United States Patent Application Publication US 2023/0083931 A1 - sequence listing, part 2

SEQ ID NO: 12756 - protein, 25 aa, Artificial Sequence
  Description of Artificial Sequence: Synthetic peptide
LLLDKRTTCFSVAALTNNVAFQTVK

SEQ ID NO: 12757 - protein, 25 aa, Artificial Sequence
  Description of Artificial Sequence: Synthetic peptide
YYKKVDGVVQQLPETYFTQSRNLQE

SEQ ID NO: 12758 - protein, 25 aa, Artificial Sequence
  Description of Artificial Sequence: Synthetic peptide
YKKVDGVVQQLPETYFTQSRNLQEF

SEQ ID NO: 12759 - protein, 25 aa, Artificial Sequence
  Description of Artificial Sequence: Synthetic peptide
EQDKNTQEVFAQVKQIYKTPPIKDF

SEQ ID NO: 12760 - protein, 25 aa, Artificial Sequence
  Description of Artificial Sequence: Synthetic peptide
VEQDKNTQEVFAQVKQIYKTPPIKD

SEQ ID NO: 12761 - protein, 25 aa, Artificial Sequence
  Description of Artificial Sequence: Synthetic peptide
AVEQDKNTQEVFAQVKQIYKTPPIK

SEQ ID NO: 12762 - protein, 25 aa, Artificial Sequence
  Description of Artificial Sequence: Synthetic peptide
IAVEQDKNTQEVFAQVKQIYKTPPI

SEQ ID NO: 12763 - protein, 25 aa, Artificial Sequence
  Description of Artificial Sequence: Synthetic peptide
QDKNTQEVFAQVKQIYKTPPIKDFG

SEQ ID NO: 12764 - protein, 25 aa, Artificial Sequence
  Description of Artificial Sequence: Synthetic peptide
KNTQEVFAQVKQIYKTPPIKDFGGF

SEQ ID NO: 12765 - protein, 25 aa, Artificial Sequence
  Description of Artificial Sequence: Synthetic peptide
NTQEVFAQVKQIYKTPPIKDFGGFN

SEQ ID NO: 12766 - protein, 25 aa, Artificial Sequence
  Description of Artificial Sequence: Synthetic peptide
QPRTFLLKYNENGTITDAVDCALDP

SEQ ID NO: 12767 - protein, 25 aa, Artificial Sequence
  Description of Artificial Sequence: Synthetic peptide
ADLVYALRHFDEGNCDTLKEILVTY

SEQ ID NO: 12768 - protein, 25 aa, Artificial Sequence
  Description of Artificial Sequence: Synthetic peptide
INRPQIGVVREFLTRNPAWRKAVFI

SEQ ID NO: 12769 - protein, 25 aa, Artificial Sequence
  Description of Artificial Sequence: Synthetic peptide
RPQIGVVREFLTRNPAWRKAVFISP

SEQ ID NO: 12770 - protein, 25 aa, Artificial Sequence
  Description of Artificial Sequence: Synthetic peptide
NRPQIGVVREFLTRNPAWRKAVFIS

SEQ ID NO: 12771 - protein, 25 aa, Artificial Sequence
  Description of Artificial Sequence: Synthetic peptide
SAINRPQIGVVREFLTRNPAWRKAV

SEQ ID NO: 12772 - protein, 25 aa, Artificial Sequence
  Description of Artificial Sequence: Synthetic peptide
AINRPQIGVVREFLTRNPAWRKAVF

SEQ ID NO: 12773 - protein, 25 aa, Artificial Sequence
  Description of Artificial Sequence: Synthetic peptide
PQIGVVREFLTRNPAWRKAVFISPY

SEQ ID NO: 12774 - protein, 25 aa, Artificial Sequence
  Description of Artificial Sequence: Synthetic peptide
SSAINRPQIGVVREFLTRNPAWRKA

SEQ ID NO: 12775 - protein, 25 aa, Artificial Sequence
  Description of Artificial Sequence: Synthetic peptide
ANQFNSAIGKIQDSLSSTASALGKL

SEQ ID NO: 12776 - protein, 25 aa, Artificial Sequence
  Description of Artificial Sequence: Synthetic peptide
TKHPNQEYADVFHLYLQYIRKLHDE

SEQ ID NO: 12777 - protein, 25 aa, Artificial Sequence
  Description of Artificial Sequence: Synthetic peptide
ALALLLLDRLNQLESKMSGKGQQQQ

SEQ ID NO: 12778 - protein, 25 aa, Artificial Sequence
  Description of Artificial Sequence: Synthetic peptide
DQDALFAYTKRNVIPTITQMNLKYA

SEQ ID NO: 12779 - protein, 25 aa, Artificial Sequence
  Description of Artificial Sequence: Synthetic peptide
VAGDSGFAAYSRYRIGNYKLNTDHS

SEQ ID NO: 12780 - protein, 25 aa, Artificial Sequence
  Description of Artificial Sequence: Synthetic peptide
QRVAGDSGFAAYSRYRIGNYKLNTD

SEQ ID NO: 12781 - protein, 25 aa, Artificial Sequence
  Description of Artificial Sequence: Synthetic peptide
GASQRVAGDSGFAAYSRYRIGNYKL

SEQ ID NO: 12782 - protein, 25 aa, Artificial Sequence
  Description of Artificial Sequence: Synthetic peptide
ASQRVAGDSGFAAYSRYRIGNYKLN

SEQ ID NO: 12783 - protein, 25 aa, Artificial Sequence
  Description of Artificial Sequence: Synthetic peptide
RVAGDSGFAAYSRYRIGNYKLNTDH

SEQ ID NO: 12784 - protein, 25 aa, Artificial Sequence
  Description of Artificial Sequence: Synthetic peptide
SQRVAGDSGFAAYSRYRIGNYKLNT

SEQ ID NO: 12785 - protein, 25 aa, Artificial Sequence
  Description of Artificial Sequence: Synthetic peptide
PETYFTQSRNLQEFKPRSQMEIDFL

SEQ ID NO: 12786 - protein, 25 aa, Artificial Sequence
  Description of Artificial Sequence: Synthetic peptide
NVAFELWAKRNIKPVPEVKILNNLG

SEQ ID NO: 12787 - protein, 25 aa, Artificial Sequence
  Description of Artificial Sequence: Synthetic peptide
VAFELWAKRNIKPVPEVKILNNLGV

SEQ ID NO: 12788 - protein, 25 aa, Artificial Sequence
  Description of Artificial Sequence: Synthetic peptide
NLNESLIDLQELGKYEQYIKWPWYI

SEQ ID NO: 12789 - protein, 25 aa, Artificial Sequence
  Description of Artificial Sequence: Synthetic peptide
NESLIDLQELGKYEQYIKWPWYIWL

SEQ ID NO: 12790 - protein, 25 aa, Artificial Sequence
  Description of Artificial Sequence: Synthetic peptide
LNESLIDLQELGKYEQYIKWPWYIW

SEQ ID NO: 12791 - protein, 25 aa, Artificial Sequence
  Description of Artificial Sequence: Synthetic peptide
VPEVKILNNLGVDIAANTVIWDYKR

SEQ ID NO: 12792 - protein, 25 aa, Artificial Sequence
  Description of Artificial Sequence: Synthetic peptide
CELYHYQECVRGTTVLLKEPCSSGT

SEQ ID NO: 12793 - protein, 25 aa, Artificial Sequence
  Description of Artificial Sequence: Synthetic peptide
ELYHYQECVRGTTVLLKEPCSSGTY

SEQ ID NO: 12794 - protein, 25 aa, Artificial Sequence
  Description of Artificial Sequence: Synthetic peptide
TCELYHYQECVRGTTVLLKEPCSSG

SEQ ID NO: 12795 - protein, 25 aa, Artificial Sequence
  Description of Artificial Sequence: Synthetic peptide
ATCELYHYQECVRGTTVLLKEPCSS

SEQ ID NO: 12796 - protein, 25 aa, Artificial Sequence
  Description of Artificial Sequence: Synthetic peptide
LSDRVVFVLWAHGFELTSMKYFVKI

SEQ ID NO: 12797 - protein, 25 aa, Artificial Sequence
  Description of Artificial Sequence: Synthetic peptide
LKNLSDRVVFVLWAHGFELTSMKYF

SEQ ID NO: 12798 - protein, 25 aa, Artificial Sequence
  Description of Artificial Sequence: Synthetic peptide
KNLSDRVVFVLWAHGFELTSMKYFV

SEQ ID NO: 12799 - protein, 25 aa, Artificial Sequence
  Description of Artificial Sequence: Synthetic peptide
NLSDRVVFVLWAHGFELTSMKYFVK

SEQ ID NO: 12800 - protein, 25 aa, Artificial Sequence
  Description of Artificial Sequence: Synthetic peptide
DTLKNLSDRVVFVLWAHGFELTSMK

SEQ ID NO: 12801 - protein, 25 aa, Artificial Sequence
  Description of Artificial Sequence: Synthetic peptide
TLKNLSDRVVFVLWAHGFELTSMKY

SEQ ID NO: 12802 - protein, 25 aa, Artificial Sequence
  Description of Artificial Sequence: Synthetic peptide
PLMYKGLPWNVVRIKIVQMLSDTLK

SEQ ID NO: 12803 - protein, 25 aa, Artificial Sequence
  Description of Artificial Sequence: Synthetic peptide
GLTGTGVLTESNKKFLPFQQFGRDI

SEQ ID NO: 12804 - protein, 25 aa, Artificial Sequence
  Description of Artificial Sequence: Synthetic peptide
LTGTGVLTESNKKFLPFQQFGRDIA

SEQ ID NO: 12805 - protein, 25 aa, Artificial Sequence
  Description of Artificial Sequence: Synthetic peptide
TGTGVLTESNKKFLPFQQFGRDIAD

SEQ ID NO: 12806 - protein, 25 aa, Artificial Sequence
  Description of Artificial Sequence: Synthetic peptide
RQRLTKYTMADLVYALRHFDEGNCD

SEQ ID NO: 12807 - protein, 25 aa, Artificial Sequence
  Description of Artificial Sequence: Synthetic peptide
ISRQRLTKYTMADLVYALRHFDEGN

SEQ ID NO: 12808 - protein, 25 aa, Artificial Sequence
  Description of Artificial Sequence: Synthetic peptide
SRQRLTKYTMADLVYALRHFDEGNC

SEQ ID NO: 12809 - protein, 25 aa, Artificial Sequence
  Description of Artificial Sequence: Synthetic peptide
NFNGLTGTGVLTESNKKFLPFQQFG

SEQ ID NO: 12810 - protein, 25 aa, Artificial Sequence
  Description of Artificial Sequence: Synthetic peptide
NFNFNGLTGTGVLTESNKKFLPFQQ

SEQ ID NO: 12811 - protein, 25 aa, Artificial Sequence
  Description of Artificial Sequence: Synthetic peptide
FNFNGLTGTGVLTESNKKFLPFQQF

SEQ ID NO: 12812 - protein, 25 aa, Artificial Sequence
  Description of Artificial Sequence: Synthetic peptide
AIRHVRAWIGFDVEGCHATREAVGT

SEQ ID NO: 12813 - protein, 25 aa, Artificial Sequence
  Description of Artificial Sequence: Synthetic peptide
EAIRHVRAWIGFDVEGCHATREAVG

SEQ ID NO: 12814 - protein, 25 aa, Artificial Sequence
  Description of Artificial Sequence: Synthetic peptide
RHVRAWIGFDVEGCHATREAVGTNL

SEQ ID NO: 12815 - protein, 25 aa, Artificial Sequence
  Description of Artificial Sequence: Synthetic peptide
IRHVRAWIGFDVEGCHATREAVGTN

SEQ ID NO: 12816 - protein, 25 aa, Artificial Sequence
  Description of Artificial Sequence: Synthetic peptide
GVYYHKNNKSWMESEFRVYSSANNC

SEQ ID NO: 12817 - protein, 25 aa, Artificial Sequence
  Description of Artificial Sequence: Synthetic peptide
FTIYSLLLCRMNSRNYIAQVDVVNF

SEQ ID NO: 12818 - protein, 25 aa, Artificial Sequence
  Description of Artificial Sequence: Synthetic peptide
IYSLLLCRMNSRNYIAQVDVVNFNL

SEQ ID NO: 12819 - protein, 25 aa, Artificial Sequence
  Description of Artificial Sequence: Synthetic peptide
AFPFTIYSLLLCRMNSRNYIAQVDV

SEQ ID NO: 12820 - protein, 25 aa, Artificial Sequence
  Description of Artificial Sequence: Synthetic peptide
FPFTIYSLLLCRMNSRNYIAQVDVV

SEQ ID NO: 12821 - protein, 25 aa, Artificial Sequence
  Description of Artificial Sequence: Synthetic peptide
PFTIYSLLLCRMNSRNYIAQVDVVN

SEQ ID NO: 12822 - protein, 25 aa, Artificial Sequence
  Description of Artificial Sequence: Synthetic peptide
FAFPFTIYSLLLCRMNSRNYIAQVD

SEQ ID NO: 12823 - protein, 25 aa, Artificial Sequence
  Description of Artificial Sequence: Synthetic peptide
TIYSLLLCRMNSRNYIAQVDVVNFN

SEQ ID NO: 12824 - protein, 25 aa, Artificial Sequence
  Description of Artificial Sequence: Synthetic peptide
VFAFPFTIYSLLLCRMNSRNYIAQV

SEQ ID NO: 12825 - protein, 25 aa, Artificial Sequence
  Description of Artificial Sequence: Synthetic peptide
NVFAFPFTIYSLLLCRMNSRNYIAQ

SEQ ID NO: 12826 - protein, 25 aa, Artificial Sequence
  Description of Artificial Sequence: Synthetic peptide
VNRFNVAITRAKVGILCIMSDRDLY

SEQ ID NO: 12827 - protein, 25 aa, Artificial Sequence
  Description of Artificial Sequence: Synthetic peptide
VITHDVSSAINRPQIGVVREFLTRN

SEQ ID NO: 12828 - protein, 25 aa, Artificial Sequence
  Description of Artificial Sequence: Synthetic peptide
AFDKSAFVNLKQLPFFYYSDSPCES

SEQ ID NO: 12829 - protein, 25 aa, Artificial Sequence
  Description of Artificial Sequence: Synthetic peptide
FDKSAFVNLKQLPFFYYSDSPCESH

SEQ ID NO: 12830 - protein, 25 aa, Artificial Sequence
  Description of Artificial Sequence: Synthetic peptide
HFPREGVFVSNGTHWFVTQRNFYEP

SEQ ID NO: 12831 - protein, 25 aa, Artificial Sequence
  Description of Artificial Sequence: Synthetic peptide
AHFPREGVFVSNGTHWFVTQRNFYE

SEQ ID NO: 12832 - protein, 25 aa, Artificial Sequence
  Description of Artificial Sequence: Synthetic peptide
SNVANYQKVGMQKYSTLQGPPGTGK

SEQ ID NO: 12833 - protein, 25 aa, Artificial Sequence
  Description of Artificial Sequence: Synthetic peptide
NGTKRFDNPVLPFNDGVYFASTEKS

SEQ ID NO: 12834 - protein, 25 aa, Artificial Sequence
  Description of Artificial Sequence: Synthetic peptide
LGSLVVRCSFYEDFLEYHDVRVVLD

SEQ ID NO: 12835 - protein, 25 aa, Artificial Sequence
  Description of Artificial Sequence: Synthetic peptide
GSLVVRCSFYEDFLEYHDVRVVLDF

SEQ ID NO: 12836 - protein, 25 aa, Artificial Sequence
  Description of Artificial Sequence: Synthetic peptide
SLVVRCSFYEDFLEYHDVRVVLDFI

SEQ ID NO: 12837 - protein, 25 aa, Artificial Sequence
  Description of Artificial Sequence: Synthetic peptide
VDFQVTIAEILLIIMRTFKVSIWNL

SEQ ID NO: 12838 - protein, 25 aa, Artificial Sequence
  Description of Artificial Sequence: Synthetic peptide
VLLPLVSSQCVNLTTRTQLPPAYTN

SEQ ID NO: 12839 - protein, 25 aa, Artificial Sequence
  Description of Artificial Sequence: Synthetic peptide
LVLLPLVSSQCVNLTTRTQLPPAYT

SEQ ID NO: 12840 - protein, 25 aa, Artificial Sequence
  Description of Artificial Sequence: Synthetic peptide
PYNMRVIHFGAGSDKGVAPGTAVLR

SEQ ID NO: 12841 - protein, 25 aa, Artificial Sequence
  Description of Artificial Sequence: Synthetic peptide
LAVPYNMRVIHFGAGSDKGVAPGTA

SEQ ID NO: 12842 - protein, 25 aa, Artificial Sequence
  Description of Artificial Sequence: Synthetic peptide
VPYNMRVIHFGAGSDKGVAPGTAVL

SEQ ID NO: 12843 - protein, 25 aa, Artificial Sequence
  Description of Artificial Sequence: Synthetic peptide
YNMRVIHFGAGSDKGVAPGTAVLRQ

SEQ ID NO: 12844 - protein, 25 aa, Artificial Sequence
  Description of Artificial Sequence: Synthetic peptide
AVPYNMRVIHFGAGSDKGVAPGTAV

SEQ ID NO: 12845 - protein, 25 aa, Artificial Sequence
  Description of Artificial Sequence: Synthetic peptide
TLLALHRSYLTPGDSSSGWTAGAAA

SEQ ID NO: 12846 - protein, 25 aa, Artificial Sequence
  Description of Artificial Sequence: Synthetic peptide
AGSDKGVAPGTAVLRQWLPTGTLLV

SEQ ID NO: 12847 - protein, 25 aa, Artificial Sequence
  Description of Artificial Sequence: Synthetic peptide
TITQMNLKYAISAKNRARTVAGVSI

SEQ ID NO: 12848 - protein, 25 aa, Artificial Sequence
  Description of Artificial Sequence: Synthetic peptide
PTITQMNLKYAISAKNRARTVAGVS

SEQ ID NO: 12849 - protein, 25 aa, Artificial Sequence
  Description of Artificial Sequence: Synthetic peptide
ITQMNLKYAISAKNRARTVAGVSIC

SEQ ID NO: 12850 - protein, 25 aa, Artificial Sequence
  Description of Artificial Sequence: Synthetic peptide
FNVAITRAKVGILCIMSDRDLYDKL

SEQ ID NO: 12851 - protein, 25 aa, Artificial Sequence
  Description of Artificial Sequence: Synthetic peptide
VAITRAKVGILCIMSDRDLYDKLQF

SEQ ID NO: 12852 - protein, 25 aa, Artificial Sequence
  Description of Artificial Sequence: Synthetic peptide
RFNVAITRAKVGILCIMSDRDLYDK

SEQ ID NO: 12853 - protein, 25 aa, Artificial Sequence
  Description of Artificial Sequence: Synthetic peptide
NVAITRAKVGILCIMSDRDLYDKLQ

SEQ ID NO: 12854 - protein, 25 aa, Artificial Sequence
  Description of Artificial Sequence: Synthetic peptide
LYLQYIRKLHDELTGHMLDMYSVML

SEQ ID NO: 12855 - protein, 25 aa, Artificial Sequence
  Description of Artificial Sequence: Synthetic peptide
DYYRYNLPTMCDIRQLLFVVEVVDK

SEQ ID NO: 12856 - protein, 25 aa, Artificial Sequence
  Description of Artificial Sequence: Synthetic peptide
YYRYNLPTMCDIRQLLFVVEVVDKY

SEQ ID NO: 12857 - protein, 25 aa, Artificial Sequence
  Description of Artificial Sequence: Synthetic peptide
INFVRIIMRLWLCWKCRSKNPLLYD

SEQ ID NO: 12858 - protein, 25 aa, Artificial Sequence
  Description of Artificial Sequence: Synthetic peptide
NFVRIIMRLWLCWKCRSKNPLLYDA

SEQ ID NO: 12859 - protein, 25 aa, Artificial Sequence
  Description of Artificial Sequence: Synthetic peptide
KRHTFSNYQHEETIYNLLKDCPAVA

SEQ ID NO: 12860 - protein, 25 aa, Artificial Sequence
  Description of Artificial Sequence: Synthetic peptide
VKRHTFSNYQHEETIYNLLKDCPAV

SEQ ID NO: 12861 - protein, 25 aa, Artificial Sequence
  Description of Artificial Sequence: Synthetic peptide
VVKRHTFSNYQHEETIYNLLKDCPA

SEQ ID NO: 12862 - protein, 25 aa, Artificial Sequence
  Description of Artificial Sequence: Synthetic peptide
ECVRGTTVLLKEPCSSGTYEGNSPF

SEQ ID NO: 12863 - protein, 25 aa, Artificial Sequence
  Description of Artificial Sequence: Synthetic peptide
CVRGTTVLLKEPCSSGTYEGNSPFH

SEQ ID NO: 12864 - protein, 25 aa, Artificial Sequence
  Description of Artificial Sequence: Synthetic peptide
NGYPNMFITREEAIRHVRAWIGFDV

SEQ ID NO: 12865 - protein, 25 aa, Artificial Sequence
  Description of Artificial Sequence: Synthetic peptide
ISTIGVCSMTDIAKKPTETICAPLT

SEQ ID NO: 12866 - protein, 25 aa, Artificial Sequence
  Description of Artificial Sequence: Synthetic peptide
HISTIGVCSMTDIAKKPTETICAPL

SEQ ID NO: 12867 - protein, 25 aa, Artificial Sequence
  Description of Artificial Sequence: Synthetic peptide
TIGVCSMTDIAKKPTETICAPLTVF

SEQ ID NO: 12868 - protein, 25 aa, Artificial Sequence
  Description of Artificial Sequence: Synthetic peptide
STIGVCSMTDIAKKPTETICAPLTV

SEQ ID NO: 12869 - protein, 25 aa, Artificial Sequence
  Description of Artificial Sequence: Synthetic peptide
IAGLIAIVMVTIMLCCMTSCCSCLK

SEQ ID NO: 12870 - protein, 25 aa, Artificial Sequence
  Description of Artificial Sequence: Synthetic peptide
VMVTIMLCCMTSCCSCLKGCCSCGS

SEQ ID NO: 12871 - protein, 25 aa, Artificial Sequence
  Description of Artificial Sequence: Synthetic peptide
IVMVTIMLCCMTSCCSCLKGCCSCG

SEQ ID NO: 12872 - protein, 25 aa, Artificial Sequence
  Description of Artificial Sequence: Synthetic peptide
AIVMVTIMLCCMTSCCSCLKGCCSC

SEQ ID NO: 12873 - protein, 25 aa, Artificial Sequence
  Description of Artificial Sequence: Synthetic peptide
GLIAIVMVTIMLCCMTSCCSCLKGC

SEQ ID NO: 12874 - protein, 25 aa, Artificial Sequence
  Description of Artificial Sequence: Synthetic peptide
IAIVMVTIMLCCMTSCCSCLKGCCS

SEQ ID NO: 12875 - protein, 25 aa, Artificial Sequence
  Description of Artificial Sequence: Synthetic peptide
MVTIMLCCMTSCCSCLKGCCSCGSC

SEQ ID NO: 12876 - protein, 25 aa, Artificial Sequence
  Description of Artificial Sequence: Synthetic peptide
GFIAGLIAIVMVTIMLCCMTSCCSC

SEQ ID NO: 12877 - protein, 25 aa, Artificial Sequence
  Description of Artificial Sequence: Synthetic peptide
AGLIAIVMVTIMLCCMTSCCSCLKG

SEQ ID NO: 12878 - protein, 25 aa, Artificial Sequence
  Description of Artificial Sequence: Synthetic peptide
LIAIVMVTIMLCCMTSCCSCLKGCC

SEQ ID NO: 12879 - protein, 25 aa, Artificial Sequence
  Description of Artificial Sequence: Synthetic peptide
FIAGLIAIVMVTIMLCCMTSCCSCL

SEQ ID NO: 12880 - protein, 25 aa, Artificial Sequence
  Description of Artificial Sequence: Synthetic peptide
DHVISTSHKLVLSVNPYVCNAPGCD

SEQ ID NO: 12881 - protein, 25 aa, Artificial Sequence
  Description of Artificial Sequence: Synthetic peptide
LDDRCILHCANFNVLFSTVFPPTSF

SEQ ID NO: 12882 - protein, 25 aa, Artificial Sequence
  Description of Artificial Sequence: Synthetic peptide
QTVDSSQGSEYDYVIFTQTTETAHS

SEQ ID NO: 12883 - protein, 25 aa, Artificial Sequence
  Description of Artificial Sequence: Synthetic peptide
KTDGTLMIERFVSLAIDAYPLTKHP

SEQ ID NO: 12884 - protein, 25 aa, Artificial Sequence
  Description of Artificial Sequence: Synthetic peptide
TDGTLMIERFVSLAIDAYPLTKHPN

SEQ ID NO: 12885 - protein, 25 aa, Artificial Sequence
  Description of Artificial Sequence: Synthetic peptide
IKVCEFQFCNDPFLGVYYHKNNKSW

SEQ ID NO: 12886 - protein, 25 aa, Artificial Sequence
  Description of Artificial Sequence: Synthetic peptide
LIGLAKRFKESPFELEDFIPMDSTV

SEQ ID NO: 12887 - protein, 25 aa, Artificial Sequence
  Description of Artificial Sequence: Synthetic peptide
KVCEFQFCNDPFLGVYYHKNNKSWM

SEQ ID NO: 12888 - protein, 25 aa, Artificial Sequence
  Description of Artificial Sequence: Synthetic peptide
HLLIGLAKRFKESPFELEDFIPMDS

SEQ ID NO: 12889 - protein, 25 aa, Artificial Sequence
  Description of Artificial Sequence: Synthetic peptide
VIKVCEFQFCNDPFLGVYYHKNNKS

SEQ ID NO: 12890 - protein, 25 aa, Artificial Sequence
  Description of Artificial Sequence: Synthetic peptide
IGLAKRFKESPFELEDFIPMDSTVK

SEQ ID NO: 12891 - protein, 25 aa, Artificial Sequence
  Description of Artificial Sequence: Synthetic peptide
LLIGLAKRFKESPFELEDFIPMDST

SEQ ID NO: 12892 - protein, 25 aa, Artificial Sequence
  Description of Artificial Sequence: Synthetic peptide
GTYEGNSPFHPLADNKFALTCFSTQ

SEQ ID NO: 12893 - protein, 25 aa, Artificial Sequence
  Description of Artificial Sequence: Synthetic peptide
GNSPFHPLADNKFALTCFSTQFAFA

SEQ ID NO: 12894 - protein, 25 aa, Artificial Sequence
  Description of Artificial Sequence: Synthetic peptide
EGNSPFHPLADNKFALTCFSTQFAF

SEQ ID NO: 12895 - protein, 25 aa, Artificial Sequence
  Description of Artificial Sequence: Synthetic peptide
SPFHPLADNKFALTCFSTQFAFACP

SEQ ID NO: 12896 - protein, 25 aa, Artificial Sequence
  Description of Artificial Sequence: Synthetic peptide
NITNLCPFGEVFNATRFASVYAWNR

SEQ ID NO: 12897 - protein, 25 aa, Artificial Sequence
  Description of Artificial Sequence: Synthetic peptide
HTPAFDKSAFVNLKQLPFFYYSDSP

SEQ ID NO: 12898 - protein, 25 aa, Artificial Sequence
  Description of Artificial Sequence: Synthetic peptide
VNKHAFHTPAFDKSAFVNLKQLPFF

SEQ ID NO: 12899 - protein, 25 aa, Artificial Sequence
  Description of Artificial Sequence: Synthetic peptide
FHTPAFDKSAFVNLKQLPFFYYSDS

SEQ ID NO: 12900 - protein, 25 aa, Artificial Sequence
  Description of Artificial Sequence: Synthetic peptide
KHAFHTPAFDKSAFVNLKQLPFFYY

SEQ ID NO: 12901 - protein, 25 aa, Artificial Sequence
  Description of Artificial Sequence: Synthetic peptide
NKHAFHTPAFDKSAFVNLKQLPFFY

SEQ ID NO: 12902 - protein, 25 aa, Artificial Sequence
  Description of Artificial Sequence: Synthetic peptide
TPAFDKSAFVNLKQLPFFYYSDSPC

SEQ ID NO: 12903 - protein, 25 aa, Artificial Sequence
  Description of Artificial Sequence: Synthetic peptide
HAFHTPAFDKSAFVNLKQLPFFYYS

SEQ ID NO: 12904 - protein, 25 aa, Artificial Sequence
  Description of Artificial Sequence: Synthetic peptide
AFHTPAFDKSAFVNLKQLPFFYYSD

SEQ ID NO: 12905 - protein, 25 aa, Artificial Sequence
  Description of Artificial Sequence: Synthetic peptide
ADYSVLYNSASFSTFKCYGVSPTKL

SEQ ID NO: 12906 - protein, 25 aa, Artificial Sequence
  Description of Artificial Sequence: Synthetic peptide
VADYSVLYNSASFSTFKCYGVSPTK

SEQ ID NO: 12907 - protein, 25 aa, Artificial Sequence
  Description of Artificial Sequence: Synthetic peptide
VVIGTSKFYGGWHNMLKTVYSDVEN

SEQ ID NO: 12908 - protein, 25 aa, Artificial Sequence
  Description of Artificial Sequence: Synthetic peptide
GTLIVNSVLLFLAFVVFLLVTLAIL

SEQ ID NO: 12909 - protein, 25 aa, Artificial Sequence
  Description of Artificial Sequence: Synthetic peptide
TGTLIVNSVLLFLAFVVFLLVTLAI

SEQ ID NO: 12910 - protein, 25 aa, Artificial Sequence
  Description of Artificial Sequence: Synthetic peptide
PAQLPAPRTLLTKGTLEPEYFNSVC

SEQ ID NO: 12911 - protein, 25 aa, Artificial Sequence
  Description of Artificial Sequence: Synthetic peptide
GTSKFYGGWHNMLKTVYSDVENPHL

SEQ ID NO: 12912 - protein, 25 aa, Artificial Sequence
  Description of Artificial Sequence: Synthetic peptide
IGTSKFYGGWHNMLKTVYSDVENPH

SEQ ID NO: 12913 - protein, 25 aa, Artificial Sequence
  Description of Artificial Sequence: Synthetic peptide
TSPDVDLGDISGINASVVNIQKEID

SEQ ID NO: 12914 - protein, 25 aa, Artificial Sequence
  Description of Artificial Sequence: Synthetic peptide
HTSPDVDLGDISGINASVVNIQKEI

SEQ ID NO: 12915 - protein, 25 aa, Artificial Sequence
  Description of Artificial Sequence: Synthetic peptide
CLPFTINCQEPKLGSLVVRCSFYED

SEQ ID NO: 12916 - protein, 25 aa, Artificial Sequence
  Description of Artificial Sequence: Synthetic peptide
SCLPFTINCQEPKLGSLVVRCSFYE

SEQ ID NO: 12917 - protein, 25 aa, Artificial Sequence
  Description of Artificial Sequence: Synthetic peptide
SHTVMPLSAPTLVPQEHYVRITGLY

SEQ ID NO: 12918 - protein, 25 aa, Artificial Sequence
  Description of Artificial Sequence: Synthetic peptide
SEYDYVIFTQTTETAHSCNVNRFNV

SEQ ID NO: 12919 - protein, 25 aa, Artificial Sequence
  Description of Artificial Sequence: Synthetic peptide
YDYVIFTQTTETAHSCNVNRFNVAI

SEQ ID NO: 12920 - protein, 25 aa, Artificial Sequence
  Description of Artificial Sequence: Synthetic peptide
EYDYVIFTQTTETAHSCNVNRFNVA

SEQ ID NO: 12921 - protein, 25 aa, Artificial Sequence
  Description of Artificial Sequence: Synthetic peptide
TACSHAAVDALCEKALKYLPIDKCS

SEQ ID NO: 12922 - protein, 25 aa, Artificial Sequence
  Description of Artificial Sequence: Synthetic peptide
FRKSNLKPFERDISTEIYQAGSTPC

SEQ ID NO: 12923 - protein, 25 aa, Artificial Sequence
  Description of Artificial Sequence: Synthetic peptide
LFRKSNLKPFERDISTEIYQAGSTP

SEQ ID NO: 12924 - protein, 25 aa, Artificial Sequence
  Description of Artificial Sequence: Synthetic peptide
RLFRKSNLKPFERDISTEIYQAGST

SEQ ID NO: 12925 - protein, 25 aa, Artificial Sequence
  Description of Artificial Sequence: Synthetic peptide
YRLFRKSNLKPFERDISTEIYQAGS

SEQ ID NO: 12926 - protein, 25 aa, Artificial Sequence
  Description of Artificial Sequence: Synthetic peptide
RKSNLKPFERDISTEIYQAGSTPCN

SEQ ID NO: 12927 - protein, 25 aa, Artificial Sequence
  Description of Artificial Sequence: Synthetic peptide
DLATNNLVVMAYITGGVVQLTSQWL

SEQ ID NO: 12928 - protein, 25 aa, Artificial Sequence
  Description of Artificial Sequence: Synthetic peptide
NSFTRGVYYPDKVFRSSVLHSTQDL

SEQ ID NO: 12929 - protein, 25 aa, Artificial Sequence
  Description of Artificial Sequence: Synthetic peptide
FEKGDYGDAVVYRGTTTYKLNVGDY

SEQ ID NO: 12930 - protein, 25 aa, Artificial Sequence
  Description of Artificial Sequence: Synthetic peptide
EKGDYGDAVVYRGTTTYKLNVGDYF

SEQ ID NO: 12931 - protein, 25 aa, Artificial Sequence
  Description of Artificial Sequence: Synthetic peptide
WTIEYPIIGDELKINAACRKVQHMV

SEQ ID NO: 12932 - protein, 25 aa, Artificial Sequence
  Description of Artificial Sequence: Synthetic peptide
YPIIGDELKINAACRKVQHMVVKAA

SEQ ID NO: 12933 - protein, 25 aa, Artificial Sequence
  Description of Artificial Sequence: Synthetic peptide
IEYPIIGDELKINAACRKVQHMVVK

SEQ ID NO: 12934 - protein, 25 aa, Artificial Sequence
  Description of Artificial Sequence: Synthetic peptide
EYPIIGDELKINAACRKVQHMVVKA

SEQ ID NO: 12935 - protein, 25 aa, Artificial Sequence
  Description of Artificial Sequence: Synthetic peptide
TIEYPIIGDELKINAACRKVQHMVV

SEQ ID NO: 12936 - protein, 25 aa, Artificial Sequence
  Description of Artificial Sequence: Synthetic peptide
PIIGDELKINAACRKVQHMVVKAAL

SEQ ID NO: 12937 - protein, 25 aa, Artificial Sequence
  Description of Artificial Sequence: Synthetic peptide
TLVKQLSSNFGAISSVLNDILSRLD

SEQ ID NO: 12938 - protein, 25 aa, Artificial Sequence
  Description of Artificial Sequence: Synthetic peptide
NTLVKQLSSNFGAISSVLNDILSRL

SEQ ID NO: 12939 - protein, 25 aa, Artificial Sequence
  Description of Artificial Sequence: Synthetic peptide
AVASKILGLPTQTVDSSQGSEYDYV

SEQ ID NO: 12940 - protein, 25 aa, Artificial Sequence
  Description of Artificial Sequence: Synthetic peptide
NAVASKILGLPTQTVDSSQGSEYDY

SEQ ID NO: 12941 - protein, 25 aa, Artificial Sequence
  Description of Artificial Sequence: Synthetic peptide
VDALCEKALKYLPIDKCSRIIPARA

SEQ ID NO: 12942 - protein, 25 aa, Artificial Sequence
  Description of Artificial Sequence: Synthetic peptide
AQCFKMFYKGVITHDVSSAINRPQI

SEQ ID NO: 12943 - protein, 25 aa, Artificial Sequence
  Description of Artificial Sequence: Synthetic peptide
IWDYKRDAPAHISTIGVCSMTDIAK

SEQ ID NO: 12944 - protein, 25 aa, Artificial Sequence
  Description of Artificial Sequence: Synthetic peptide
NQVIVNNLDKSAGFPFNKWGKARLY

SEQ ID NO: 12945 - protein, 25 aa, Artificial Sequence
  Description of Artificial Sequence: Synthetic peptide
ESSAKSASVYYSQLMCQPILLLDQA

SEQ ID NO: 12946 - protein, 25 aa, Artificial Sequence
  Description of Artificial Sequence: Synthetic peptide
KCEESSAKSASVYYSQLMCQPILLL

SEQ ID NO: 12947 - protein, 25 aa, Artificial Sequence
  Description of Artificial Sequence: Synthetic peptide
KSKCEESSAKSASVYYSQLMCQPIL

SEQ ID NO: 12948 - protein, 25 aa, Artificial Sequence
  Description of Artificial Sequence: Synthetic peptide
CEESSAKSASVYYSQLMCQPILLLD

SEQ ID NO: 12949 - protein, 25 aa, Artificial Sequence
  Description of Artificial Sequence: Synthetic peptide
GKSKCEESSAKSASVYYSQLMCQPI

SEQ ID NO: 12950 - protein, 25 aa, Artificial Sequence
  Description of Artificial Sequence: Synthetic peptide
SKCEESSAKSASVYYSQLMCQPILL

SEQ ID NO: 12951 - protein, 25 aa, Artificial Sequence
  Description of Artificial Sequence: Synthetic peptide
EESSAKSASVYYSQLMCQPILLLDQ

SEQ ID NO: 12952 - protein, 25 aa, Artificial Sequence
  Description of Artificial Sequence: Synthetic peptide
KSAQCFKMFYKGVITHDVSSAINRP

SEQ ID NO: 12953 - protein, 25 aa, Artificial Sequence
  Description of Artificial Sequence: Synthetic peptide
CYDGGCINANQVIVNNLDKSAGFPF

SEQ ID NO: 12954 - protein, 25 aa, Artificial Sequence
  Description of Artificial Sequence: Synthetic peptide
HTPINLVRDLPQGFSALEPLVDLPI

SEQ ID NO: 12955 - protein, 25 aa, Artificial Sequence
  Description of Artificial Sequence: Synthetic peptide
KHTPINLVRDLPQGFSALEPLVDLP

SEQ ID NO: 12956 - protein, 25 aa, Artificial Sequence
  Description of Artificial Sequence: Synthetic peptide
YKGVITHDVSSAINRPQIGVVREFL

SEQ ID NO: 12957 - protein, 25 aa, Artificial Sequence
  Description of Artificial Sequence: Synthetic peptide
DNINLHTQVVDMSMTYGQQFGPTYL

SEQ ID NO: 12958 - protein, 25 aa, Artificial Sequence
  Description of Artificial Sequence: Synthetic peptide
VDNINLHTQVVDMSMTYGQQFGPTY

SEQ ID NO: 12959 - protein, 25 aa, Artificial Sequence
  Description of Artificial Sequence: Synthetic peptide
QRKYKGIKIQEGVVDYGARFYFYTS

SEQ ID NO: 12960 - protein, 25 aa, Artificial Sequence
  Description of Artificial Sequence: Synthetic peptide
KYKGIKIQEGVVDYGARFYFYTSKT

SEQ ID NO: 12961 - protein, 25 aa, Artificial Sequence
  Description of Artificial Sequence: Synthetic peptide
TIKVFTTVDNINLHTQVVDMSMTYG

SEQ ID NO: 12962 - protein, 25 aa, Artificial Sequence
  Description of Artificial Sequence: Synthetic peptide
RKYKGIKIQEGVVDYGARFYFYTSK

SEQ ID NO: 12963 - protein, 25 aa, Artificial Sequence
  Description of Artificial Sequence: Synthetic peptide
NSQNAVASKILGLPTQTVDSSQGSE

SEQ ID NO: 12964 - protein, 25 aa, Artificial Sequence
  Description of Artificial Sequence: Synthetic peptide
PYNSQNAVASKILGLPTQTVDSSQG

SEQ ID NO: 12965 - protein, 25 aa, Artificial Sequence
  Description of Artificial Sequence: Synthetic peptide
YNSQNAVASKILGLPTQTVDSSQGS

SEQ ID NO: 12966 - protein, 25 aa, Artificial Sequence
  Description of Artificial Sequence: Synthetic peptide
SQNAVASKILGLPTQTVDSSQGSEY

SEQ ID NO: 12967 - protein, 25 aa, Artificial Sequence
  Description of Artificial Sequence: Synthetic peptide
VNLHSSRLSFKELLVYAADPAMHAA

SEQ ID NO: 12968 - protein, 25 aa, Artificial Sequence
  Description of Artificial Sequence: Synthetic peptide
CTMYICGDSTECSNLLLQYGSFCTQ

SEQ ID NO: 12969 - protein, 25 aa, Artificial Sequence
  Description of Artificial Sequence: Synthetic peptide
LLKSIAATRGATVVIGTSKFYGGWH

SEQ ID NO: 12970 - protein, 25 aa, Artificial Sequence
  Description of Artificial Sequence: Synthetic peptide
LKSIAATRGATVVIGTSKFYGGWHN

SEQ ID NO: 12971 - protein, 25 aa, Artificial Sequence
  Description of Artificial Sequence: Synthetic peptide
TFEYVSQPFLMDLEGKQGNFKNLRE

SEQ ID NO: 12972 - protein, 25 aa, Artificial Sequence
  Description of Artificial Sequence: Synthetic peptide
FEYVSQPFLMDLEGKQGNFKNLREF

SEQ ID NO: 12973 - protein, 25 aa, Artificial Sequence
  Description of Artificial Sequence: Synthetic peptide
GDQELIRQGTDYKHWPQIAQFAPSA

SEQ ID NO: 12974 - protein, 25 aa, Artificial Sequence
  Description of Artificial Sequence: Synthetic peptide
ETGTLIVNSVLLFLAFVVFLLVTLA

SEQ ID NO: 12975 - protein, 25 aa, Artificial Sequence
  Description of Artificial Sequence: Synthetic peptide
ETTADIVVFDEISMATNYDLSVVNA

SEQ ID NO: 12976 - protein, 25 aa, Artificial Sequence
  Description of Artificial Sequence: Synthetic peptide
RKRISNCVADYSVLYNSASFSTFKC

SEQ ID NO: 12977 - protein, 25 aa, Artificial Sequence
  Description of Artificial Sequence: Synthetic peptide
MCDIRQLLFVVEVVDKYFDCYDGGC

SEQ ID NO: 12978 - protein, 25 aa, Artificial Sequence
  Description of Artificial Sequence: Synthetic peptide
CDIRQLLFVVEVVDKYFDCYDGGCI

SEQ ID NO: 12979 - protein, 25 aa, Artificial Sequence
  Description of Artificial Sequence: Synthetic peptide
TMCDIRQLLFVVEVVDKYFDCYDGG

SEQ ID NO: 12980 - protein, 25 aa, Artificial Sequence
  Description of Artificial Sequence: Synthetic peptide
PDPSKPSKRSFIEDLLFNKVTLADA

SEQ ID NO: 12981 - protein, 25 aa, Artificial Sequence
  Description of Artificial Sequence: Synthetic peptide
LIIMRTFKVSIWNLDYIINLIIKNL

SEQ ID NO: 12982 - protein, 25 aa, Artificial Sequence
  Description of Artificial Sequence: Synthetic peptide
IIMRTFKVSIWNLDYIINLIIKNLS

SEQ ID NO: 12983 - protein, 25 aa, Artificial Sequence
  Description of Artificial Sequence: Synthetic peptide
LFIRQEEVQELYSPIFLIVAAIVFI

SEQ ID NO: 12984 - protein, 25 aa, Artificial Sequence
  Description of Artificial Sequence: Synthetic peptide
KLFIRQEEVQELYSPIFLIVAAIVF

SEQ ID NO: 12985 - protein, 25 aa, Artificial Sequence
  Description of Artificial Sequence: Synthetic peptide
EITVATSRTLSYYKLGASQRVAGDS

SEQ ID NO: 12986 - protein, 25 aa, Artificial Sequence
  Description of Artificial Sequence: Synthetic peptide
ITVATSRTLSYYKLGASQRVAGDSG

SEQ ID NO: 12987 - protein, 25 aa, Artificial Sequence
  Description of Artificial Sequence: Synthetic peptide
VATSRTLSYYKLGASQRVAGDSGFA

SEQ ID NO: 12988 - protein, 25 aa, Artificial Sequence
  Description of Artificial Sequence: Synthetic peptide
TVATSRTLSYYKLGASQRVAGDSGF

SEQ ID NO: 12989 - protein, 25 aa, Artificial Sequence
  Description of Artificial Sequence: Synthetic peptide
DTWFSQRGGSYTNDKACPLIAAVIT

SEQ ID NO: 12990 - protein, 25 aa, Artificial Sequence
  Description of Artificial Sequence: Synthetic peptide
FSQRGGSYTNDKACPLIAAVITREV

SEQ ID NO: 12991 - protein, 25 aa, Artificial Sequence
  Description of Artificial Sequence: Synthetic peptide
WFSQRGGSYTNDKACPLIAAVITRE

SEQ ID NO: 12992 - protein, 25 aa, Artificial Sequence
  Description of Artificial Sequence: Synthetic peptide
TWFSQRGGSYTNDKACPLIAAVITR

SEQ ID NO: 12993 - protein, 25 aa, Artificial Sequence
  Description of Artificial Sequence: Synthetic peptide
FDTWFSQRGGSYTNDKACPLIAAVI

SEQ ID NO: 12994 - protein, 25 aa, Artificial Sequence
  Description of Artificial Sequence: Synthetic peptide
IFLWLLWPVTLACFVLAAVYRINWI

SEQ ID NO: 12995 - protein, 25 aa, Artificial Sequence
  Description of Artificial Sequence: Synthetic peptide
KLIFLWLLWPVTLACFVLAAVYRIN

SEQ ID NO: 12996 - protein, 25 aa, Artificial Sequence
  Description of Artificial Sequence: Synthetic peptide
LIFLWLLWPVTLACFVLAAVYRINW

SEQ ID NO: 12997 - protein, 25 aa, Artificial Sequence
  Description of Artificial Sequence: Synthetic peptide
QGNFKNLREFVFKNIDGYFKIYSKH

SEQ ID NO: 12998 - protein, 25 aa, Artificial Sequence
  Description of Artificial Sequence: Synthetic peptide
VRITGLYPTLNISDEFSSNVANYQK

SEQ ID NO: 12999 - protein, 25 aa, Artificial Sequence
  Description of Artificial Sequence: Synthetic peptide
SLQTYVTQQLIRAAEIRASANLAAT

SEQ ID NO: 13000 - protein, 25 aa, Artificial Sequence
  Description of Artificial Sequence: Synthetic peptide
DLFMRIFTIGTVTLKQGEIKDATPS

SEQ ID NO: 13001 - protein, 25 aa, Artificial Sequence
  Description of Artificial Sequence: Synthetic peptide
MDLFMRIFTIGTVTLKQGEIKDATP

SEQ ID NO: 13002 - protein, 25 aa, Artificial Sequence
  Description of Artificial Sequence: Synthetic peptide
LYSPIFLIVAAIVFITLCFTLKRKT

SEQ ID NO: 13003 - protein, 25 aa, Artificial Sequence
  Description of Artificial Sequence: Synthetic peptide
YSPIFLIVAAIVFITLCFTLKRKTE

SEQ ID NO: 13004 - protein, 25 aa, Artificial Sequence
  Description of Artificial Sequence: Synthetic peptide
YPTLNISDEFSSNVANYQKVGMQKY

SEQ ID NO: 13005 - protein, 25 aa, Artificial Sequence
  Description of Artificial Sequence: Synthetic peptide
LNISDEFSSNVANYQKVGMQKYSTL

SEQ ID NO: 13006 - protein, 25 aa, Artificial Sequence
  Description of Artificial Sequence: Synthetic peptide
ITGLYPTLNISDEFSSNVANYQKVG

SEQ ID NO: 13007 - protein, 25 aa, Artificial Sequence
  Description of Artificial Sequence: Synthetic peptide
ISDEFSSNVANYQKVGMQKYSTLQG

SEQ ID NO: 13008 - protein, 25 aa, Artificial Sequence
  Description of Artificial Sequence: Synthetic peptide
TLNISDEFSSNVANYQKVGMQKYST

SEQ ID NO: 13009 - protein, 25 aa, Artificial Sequence
  Description of Artificial Sequence: Synthetic peptide
LYPTLNISDEFSSNVANYQKVGMQK

SEQ ID NO: 13010 - protein, 25 aa, Artificial Sequence
  Description of Artificial Sequence: Synthetic peptide
PTLNISDEFSSNVANYQKVGMQKYS

SEQ ID NO: 13011 - protein, 25 aa, Artificial Sequence
  Description of Artificial Sequence: Synthetic peptide
TGLYPTLNISDEFSSNVANYQKVGM

SEQ ID NO: 13012 - protein, 25 aa, Artificial Sequence
  Description of Artificial Sequence: Synthetic peptide
GLYPTLNISDEFSSNVANYQKVGMQ

SEQ ID NO: 13013 - protein, 25 aa, Artificial Sequence
  Description of Artificial Sequence: Synthetic peptide
NISDEFSSNVANYQKVGMQKYSTLQ

SEQ ID NO: 13014 - protein, 25 aa, Artificial Sequence
  Description of Artificial Sequence: Synthetic peptide
FIRQEEVQELYSPIFLIVAAIVFIT

SEQ ID NO: 13015 - protein, 25 aa, Artificial Sequence
  Description of Artificial Sequence: Synthetic peptide
RQEEVQELYSPIFLIVAAIVFITLC

SEQ ID NO: 13016 - protein, 25 aa, Artificial Sequence
  Description of Artificial Sequence: Synthetic peptide
IRQEEVQELYSPIFLIVAAIVFITL

SEQ ID NO: 13017 - protein, 25 aa, Artificial Sequence
  Description of Artificial Sequence: Synthetic peptide
QEEVQELYSPIFLIVAAIVFITLCF

SEQ ID NO: 13018 - protein, 25 aa, Artificial Sequence
  Description of Artificial Sequence: Synthetic peptide
RFPNITNLCPFGEVFNATRFASVYA

SEQ ID NO: 13019 - protein, 25 aa, Artificial Sequence
  Description of Artificial Sequence: Synthetic peptide
VCEFQFCNDPFLGVYYHKNNKSWME

SEQ ID NO: 13020 - protein, 25 aa, Artificial Sequence
  Description of Artificial Sequence: Synthetic peptide
CEFQFCNDPFLGVYYHKNNKSWMES

SEQ ID NO: 13021 - protein, 25 aa, Artificial Sequence
  Description of Artificial Sequence: Synthetic peptide
IPLMYKGLPWNVVRIKIVQMLSDTL

SEQ ID NO: 13022 - protein, 25 aa, Artificial Sequence
  Description of Artificial Sequence: Synthetic peptide
IEDLLFNKVTLADAGFIKQYGDCLG

SEQ ID NO: 13023 - protein, 25 aa, Artificial Sequence
  Description of Artificial Sequence: Synthetic peptide
EPMLQSADAQSFLNRVCGVSAARLT

SEQ ID NO: 13024 - protein, 25 aa, Artificial Sequence
  Description of Artificial Sequence: Synthetic peptide
CSCDQLREPMLQSADAQSFLNGFAV

SEQ ID NO: 13025 - protein, 25 aa, Artificial Sequence
  Description of Artificial Sequence: Synthetic peptide
YGCSCDQLREPMLQSADAQSFLNGF

SEQ ID NO: 13026 - protein, 25 aa, Artificial Sequence
  Description of Artificial Sequence: Synthetic peptide
GCSCDQLREPMLQSADAQSFLNGFA

SEQ ID NO: 13027 - protein, 25 aa, Artificial Sequence
  Description of Artificial Sequence: Synthetic peptide
PIGALDISASIVAGGIVAIVVTCLA

SEQ ID NO: 13028 - protein, 25 aa, Artificial Sequence
  Description of Artificial Sequence: Synthetic peptide
QPIGALDISASIVAGGIVAIVVTCL

SEQ ID NO: 13029 - protein, 25 aa, Artificial Sequence
  Description of Artificial Sequence: Synthetic peptide
IGALDISASIVAGGIVAIVVTCLAY

SEQ ID NO: 13030 - protein, 25 aa, Artificial Sequence
  Description of Artificial Sequence: Synthetic peptide
GALDISASIVAGGIVAIVVTCLAYY

SEQ ID NO: 13031 - protein, 25 aa, Artificial Sequence
  Description of Artificial Sequence: Synthetic peptide
ALDPLSETKCTLKSFTVEKGIYQTS

SEQ ID NO: 13032 - protein, 25 aa, Artificial Sequence
  Description of Artificial Sequence: Synthetic peptide
DYVYLPYPDPSRILGAGCFVDDIVK

SEQ ID NO: 13033 - protein, 25 aa, Artificial Sequence
  Description of Artificial Sequence: Synthetic peptide
YLPYPDPSRILGAGCFVDDIVKTDG

SEQ ID NO: 13034 - protein, 25 aa, Artificial Sequence
  Description of Artificial Sequence: Synthetic peptide
VYLPYPDPSRILGAGCFVDDIVKTD

SEQ ID NO: 13035 - protein, 25 aa, Artificial Sequence
  Description of Artificial Sequence: Synthetic peptide
LPYPDPSRILGAGCFVDDIVKTDGT

SEQ ID NO: 13036 - protein, 25 aa, Artificial Sequence
  Description of Artificial Sequence: Synthetic peptide
YVYLPYPDPSRILGAGCFVDDIVKT

SEQ ID NO: 13037 - protein, 25 aa, Artificial Sequence
  Description of Artificial Sequence: Synthetic peptide
PYPDPSRILGAGCFVDDIVKTDGTL

SEQ ID NO: 13038 - protein, 25 aa, Artificial Sequence
  Description of Artificial Sequence: Synthetic peptide
MLKTVYSDVENPHLMGWDYPKCDRA

SEQ ID NO: 13039 - protein, 25 aa, Artificial Sequence
  Description of Artificial Sequence: Synthetic peptide
NMLKTVYSDVENPHLMGWDYPKCDR

SEQ ID NO: 13040 - protein, 25 aa, Artificial Sequence
  Description of Artificial Sequence: Synthetic peptide
LKTVYSDVENPHLMGWDYPKCDRAM

SEQ ID NO: 13041 - protein, 25 aa, Artificial Sequence
  Description of Artificial Sequence: Synthetic peptide
KRTTCFSVAALTNNVAFQTVKPGNF

SEQ ID NO: 13042 - protein, 25 aa, Artificial Sequence
  Description of Artificial Sequence: Synthetic peptide
LYENQKLIANQFNSAIGKIQDSLSS

SEQ ID NO: 13043 - protein, 25 aa, Artificial Sequence
  Description of Artificial Sequence: Synthetic peptide
ENQKLIANQFNSAIGKIQDSLSSTA

SEQ ID NO: 13044 - protein, 25 aa, Artificial Sequence
  Description of Artificial Sequence: Synthetic peptide
TQNVLYENQKLIANQFNSAIGKIQD

SEQ ID NO: 13045 - protein, 25 aa, Artificial Sequence
  Description of Artificial Sequence: Synthetic peptide
YENQKLIANQFNSAIGKIQDSLSST

SEQ ID NO: 13046 - protein, 25 aa, Artificial Sequence
  Description of Artificial Sequence: Synthetic peptide
QNVLYENQKLIANQFNSAIGKIQDS

SEQ ID NO: 13047 - protein, 25 aa, Artificial Sequence
  Description of Artificial Sequence: Synthetic peptide
NVLYENQKLIANQFNSAIGKIQDSL

SEQ ID NO: 13048 - protein, 25 aa, Artificial Sequence
  Description of Artificial Sequence: Synthetic peptide
VLYENQKLIANQFNSAIGKIQDSLS

SEQ ID NO: 13049 - protein, 25 aa, Artificial Sequence
  Description of Artificial Sequence: Synthetic peptide
TEETFKLSYGIATVREVLSDRELHL

SEQ ID NO: 13050 - protein, 25 aa, Artificial Sequence
  Description of Artificial Sequence: Synthetic peptide
SSNFGAISSVLNDILSRLDKVEAEV

SEQ ID NO: 13051 - protein, 25 aa, Artificial Sequence
  Description of Artificial Sequence: Synthetic peptide
HLGRCDIKDLPKEITVATSRTLSYY

SEQ ID NO: 13052 - protein, 25 aa, Artificial Sequence
  Description of Artificial Sequence: Synthetic peptide
WYFYYLGTGPEAGLPYGANKDGIIW

SEQ ID NO: 13053 - protein, 25 aa, Artificial Sequence
  Description of Artificial Sequence: Synthetic peptide
PRWYFYYLGTGPEAGLPYGANKDGI

SEQ ID NO: 13054 - protein, 25 aa, Artificial Sequence
  Description of Artificial Sequence: Synthetic peptide
RWYFYYLGTGPEAGLPYGANKDGII

SEQ ID NO: 13055 - protein, 25 aa, Artificial Sequence
  Description of Artificial Sequence: Synthetic peptide
ISFMLWCKDGHVETFYPKLQSSQAW

SEQ ID NO: 13056 - protein, 25 aa, Artificial Sequence
  Description of Artificial Sequence: Synthetic peptide
EISFMLWCKDGHVETFYPKLQSSQA

SEQ ID NO: 13057 - protein, 25 aa, Artificial Sequence
  Description of Artificial Sequence: Synthetic peptide
DKVFRSSVLHSTQDLFLPFFSNVTW

SEQ ID NO: 13058 - protein, 25 aa, Artificial Sequence
  Description of Artificial Sequence: Synthetic peptide
VRIKIVQMLSDTLKNLSDRVVFVLW

SEQ ID NO: 13059 - protein, 25 aa, Artificial Sequence
  Description of Artificial Sequence: Synthetic peptide
VTQNVLYENQKLIANQFNSAIGKIQ

SEQ ID NO: 13060 - protein, 25 aa, Artificial Sequence
  Description of Artificial Sequence: Synthetic peptide
GVTQNVLYENQKLIANQFNSAIGKI

SEQ ID NO: 13061 - protein, 25 aa, Artificial Sequence
  Description of Artificial Sequence: Synthetic peptide
IGVTQNVLYENQKLIANQFNSAIGK

SEQ ID NO: 13062 - protein, 25 aa, Artificial Sequence
  Description of Artificial Sequence: Synthetic peptide
REVLSDRELHLSWEVGKPRPPLNRN

SEQ ID NO: 13063 - protein, 25 aa, Artificial Sequence
  Description of Artificial Sequence: Synthetic peptide
EVLSDRELHLSWEVGKPRPPLNRNY

SEQ ID NO: 13064 - protein, 25 aa, Artificial Sequence
  Description of Artificial Sequence: Synthetic peptide
VLSDRELHLSWEVGKPRPPLNRNYV

SEQ ID NO: 13065 - protein, 25 aa, Artificial Sequence
  Description of Artificial Sequence: Synthetic peptide
CVPQADVEWKFYDAQPCSDKAYKIE

SEQ ID NO: 13066 - protein, 25 aa, Artificial Sequence
  Description of Artificial Sequence: Synthetic peptide
VPQADVEWKFYDAQPCSDKAYKIEE

SEQ ID NO: 13067 - protein, 25 aa, Artificial Sequence
  Description of Artificial Sequence: Synthetic peptide
DGYFKIYSKHTPINLVRDLPQGFSA

SEQ ID NO: 13068 - protein, 25 aa, Artificial Sequence
  Description of Artificial Sequence: Synthetic peptide
QYVFCTVNALPETTADIVVFDEISM

SEQ ID NO: 13069 - protein, 25 aa, Artificial Sequence
  Description of Artificial Sequence: Synthetic peptide
KEITVATSRTLSYYKLGASQRVAGD

SEQ ID NO: 13070 - protein, 25 aa, Artificial Sequence
  Description of Artificial Sequence: Synthetic peptide
TERLKLFAAETLKATEETFKLSYGI

SEQ ID NO: 13071 - protein, 25 aa, Artificial Sequence
  Description of Artificial Sequence: Synthetic peptide
SPRRARSVASQSIIAYTMSLGAENS

SEQ ID NO: 13072 - protein, 25 aa, Artificial Sequence
  Description of Artificial Sequence: Synthetic peptide
NSPRRARSVASQSIIAYTMSLGAEN

SEQ ID NO: 13073 - protein, 25 aa, Artificial Sequence
  Description of Artificial Sequence: Synthetic peptide
FSLWVYKQFDTYNLWNTFTRLQSLE

SEQ ID NO: 13074 - protein, 25 aa, Artificial Sequence
  Description of Artificial Sequence: Synthetic peptide
SFMLWCKDGHVETFYPKLQSSQAWQ

SEQ ID NO: 13075 - protein, 25 aa, Artificial Sequence
  Description of Artificial Sequence: Synthetic peptide
TQTNSPRRARSVASQSIIAYTMSLG

SEQ ID NO: 13076 - protein, 25 aa, Artificial Sequence
  Description of Artificial Sequence: Synthetic peptide
QTQTNSPRRARSVASQSIIAYTMSL

SEQ ID NO: 13077 - protein, 25 aa, Artificial Sequence
  Description of Artificial Sequence: Synthetic peptide
QTNSPRRARSVASQSIIAYTMSLGA

SEQ ID NO: 13078 - protein, 25 aa, Artificial Sequence
  Description of Artificial Sequence: Synthetic peptide
CCNIVNVSLVKPSFYVYSRVKNLNS

SEQ ID NO: 13079 - protein, 25 aa, Artificial Sequence
  Description of Artificial Sequence: Synthetic peptide
NIVNVSLVKPSFYVYSRVKNLNSSR

SEQ ID NO: 13080 - protein, 25 aa, Artificial Sequence
  Description of Artificial Sequence: Synthetic peptide
CNIVNVSLVKPSFYVYSRVKNLNSS

SEQ ID NO: 13081 - protein, 25 aa, Artificial Sequence
  Description of Artificial Sequence: Synthetic peptide
RRNVATLQAENVTGLFKDCSKVITG

SEQ ID NO: 13082 - protein, 25 aa, Artificial Sequence
  Description of Artificial Sequence: Synthetic peptide
RNVATLQAENVTGLFKDCSKVITGL

SEQ ID NO: 13083 - protein, 25 aa, Artificial Sequence
  Description of Artificial Sequence: Synthetic peptide
DRYPANSIVCRFDTRVLSNLNLPGC

SEQ ID NO: 13084 - protein, 25 aa, Artificial Sequence
  Description of Artificial Sequence: Synthetic peptide
RYPANSIVCRFDTRVLSNLNLPGCD

SEQ ID NO: 13085 - protein, 25 aa, Artificial Sequence
  Description of Artificial Sequence: Synthetic peptide
NYGDSATLPKGIMMNVAKYTQLCQY

SEQ ID NO: 13086 - protein, 25 aa, Artificial Sequence
  Description of Artificial Sequence: Synthetic peptide
YGDSATLPKGIMMNVAKYTQLCQYL

SEQ ID NO: 13087 - protein, 25 aa, Artificial Sequence
  Description of Artificial Sequence: Synthetic peptide
GDSATLPKGIMMNVAKYTQLCQYLN

SEQ ID NO: 13088 - protein, 25 aa, Artificial Sequence
  Description of Artificial Sequence: Synthetic peptide
CYMHHMELPTGVHAGTDLEGNFYGP

SEQ ID NO: 13089 - protein, 25 aa, Artificial Sequence
  Description of Artificial Sequence: Synthetic peptide
MHHMELPTGVHAGTDLEGNFYGPFV

SEQ ID NO: 13090 - protein, 25 aa, Artificial Sequence
  Description of Artificial Sequence: Synthetic peptide
YMHHMELPTGVHAGTDLEGNFYGPF

SEQ ID NO: 13091 - protein, 25 aa, Artificial Sequence
  Description of Artificial Sequence: Synthetic peptide
FCYMHHMELPTGVHAGTDLEGNFYG

SEQ ID NO: 13092 - protein, 25 aa, Artificial Sequence
  Description of Artificial Sequence: Synthetic peptide
SFCYMHHMELPTGVHAGTDLEGNFY

SEQ ID NO: 13093 - protein, 25 aa, Artificial Sequence
  Description of Artificial Sequence: Synthetic peptide
HHMELPTGVHAGTDLEGNFYGPFVD

SEQ ID NO: 13094 - protein, 25 aa, Artificial Sequence
  Description of Artificial Sequence: Synthetic peptide
APGTAVLRQWLPTGTLLVDSDLNDF

SEQ ID NO: 13095 - protein, 25 aa, Artificial Sequence
  Description of Artificial Sequence: Synthetic peptide
VAPGTAVLRQWLPTGTLLVDSDLND

SEQ ID NO: 13096 - protein, 25 aa, Artificial Sequence
  Description of Artificial Sequence: Synthetic peptide
GVAPGTAVLRQWLPTGTLLVDSDLN

SEQ ID NO: 13097 - protein, 25 aa, Artificial Sequence
  Description of Artificial Sequence: Synthetic peptide
GTAVLRQWLPTGTLLVDSDLNDFVS

SEQ ID NO: 13098 - protein, 25 aa, Artificial Sequence
  Description of Artificial Sequence: Synthetic peptide
PGTAVLRQWLPTGTLLVDSDLNDFV

SEQ ID NO: 13099 - protein, 25 aa, Artificial Sequence
  Description of Artificial Sequence: Synthetic peptide
ALVYDNKLKAHKDKSAQCFKMFYKG

SEQ ID NO: 13100 - protein, 25 aa, Artificial Sequence
  Description of Artificial Sequence: Synthetic peptide
VSALVYDNKLKAHKDKSAQCFKMFY

SEQ ID NO: 13101 - protein, 25 aa, Artificial Sequence
  Description of Artificial Sequence: Synthetic peptide
SALVYDNKLKAHKDKSAQCFKMFYK

SEQ ID NO: 13102 - protein, 25 aa, Artificial Sequence
  Description of Artificial Sequence: Synthetic peptide
LVYDNKLKAHKDKSAQCFKMFYKGV

SEQ ID NO: 13103 - protein, 25 aa, Artificial Sequence
  Description of Artificial Sequence: Synthetic peptide
GNFKNLREFVFKNIDGYFKIYSKHT

SEQ ID NO: 13104 - protein, 25 aa, Artificial Sequence
  Description of Artificial Sequence: Synthetic peptide
ECIKDLLARAGKASCTLSEQLDFID

SEQ ID NO: 13105 - protein, 25 aa, Artificial Sequence
  Description of Artificial Sequence: Synthetic peptide
PLECIKDLLARAGKASCTLSEQLDF

SEQ ID NO: 13106 - protein, 25 aa, Artificial Sequence
  Description of Artificial Sequence: Synthetic peptide
LECIKDLLARAGKASCTLSEQLDFI

SEQ ID NO: 13107 - protein, 25 aa, Artificial Sequence
  Description of Artificial Sequence: Synthetic peptide
YPLECIKDLLARAGKASCTLSEQLD

SEQ ID NO: 13108 - protein, 25 aa, Artificial Sequence
  Description of Artificial Sequence: Synthetic peptide
IKDLLARAGKASCTLSEQLDFIDTK

SEQ ID NO: 13109 - protein, 25 aa, Artificial Sequence
  Description of Artificial Sequence: Synthetic peptide
GYPLECIKDLLARAGKASCTLSEQL

SEQ ID NO: 13110 - protein, 25 aa, Artificial Sequence
  Description of Artificial Sequence: Synthetic peptide
CIKDLLARAGKASCTLSEQLDFIDT

SEQ ID NO: 13111 - protein, 25 aa, Artificial Sequence
  Description of Artificial Sequence: Synthetic peptide
VTGLFKDCSKVITGLHPTQAPTHLS

SEQ ID NO: 13112 - protein, 25 aa, Artificial Sequence
  Description of Artificial Sequence: Synthetic peptide
KRSFIEDLLFNKVTLADAGFIKQYG

SEQ ID NO: 13113 - protein, 25 aa, Artificial Sequence
  Description of Artificial Sequence: Synthetic peptide
SKRSFIEDLLFNKVTLADAGFIKQY

SEQ ID NO: 13114 - protein, 25 aa, Artificial Sequence
  Description of Artificial Sequence: Synthetic peptide
SFIEDLLFNKVTLADAGFIKQYGDC

SEQ ID NO: 13115 - protein, 25 aa, Artificial Sequence
  Description of Artificial Sequence: Synthetic peptide
RSFIEDLLFNKVTLADAGFIKQYGD

SEQ ID NO: 13116 - protein, 25 aa, Artificial Sequence
  Description of Artificial Sequence: Synthetic peptide
SNLKPFERDISTEIYQAGSTPCNGV

SEQ ID NO: 13117 - protein, 25 aa, Artificial Sequence
  Description of Artificial Sequence: Synthetic peptide
ISFPLCANGQVFGLYKNTCVGSDNV

SEQ ID NO: 13118 - protein, 25 aa, Artificial Sequence
  Description of Artificial Sequence: Synthetic peptide
CANGQVFGLYKNTCVGSDNVTDFNA

SEQ ID NO: 13119 - protein, 25 aa, Artificial Sequence
  Description of Artificial Sequence: Synthetic peptide
SFPLCANGQVFGLYKNTCVGSDNVT

SEQ ID NO: 13120 - protein, 25 aa, Artificial Sequence
  Description of Artificial Sequence: Synthetic peptide
FPLCANGQVFGLYKNTCVGSDNVTD

SEQ ID NO: 13121 - protein, 25 aa, Artificial Sequence
  Description of Artificial Sequence: Synthetic peptide
PLCANGQVFGLYKNTCVGSDNVTDF

SEQ ID NO: 13122 - protein, 25 aa, Artificial Sequence
  Description of Artificial Sequence: Synthetic peptide
LCANGQVFGLYKNTCVGSDNVTDFN

SEQ ID NO: 13123 - protein, 25 aa, Artificial Sequence
  Description of Artificial Sequence: Synthetic peptide
FLGIITTVAAFHQECSLQSCTQHQP

SEQ ID NO: 13124 - protein, 25 aa, Artificial Sequence
  Description of Artificial Sequence: Synthetic peptide
VFLGIITTVAAFHQECSLQSCTQHQ

SEQ ID NO: 13125 - protein, 25 aa, Artificial Sequence
  Description of Artificial Sequence: Synthetic peptide
YIATNGPLKVGGSCVLSGHNLAKHC

SEQ ID NO: 13126 - protein, 25 aa, Artificial Sequence
  Description of Artificial Sequence: Synthetic peptide
ATNGPLKVGGSCVLSGHNLAKHCLH

SEQ ID NO: 13127 - protein, 25 aa, Artificial Sequence
  Description of Artificial Sequence: Synthetic peptide
IATNGPLKVGGSCVLSGHNLAKHCL

SEQ ID NO: 13128 - protein, 25 aa, Artificial Sequence
  Description of Artificial Sequence: Synthetic peptide
TNGPLKVGGSCVLSGHNLAKHCLHV

SEQ ID NO: 13129 - protein, 25 aa, Artificial Sequence
  Description of Artificial Sequence: Synthetic peptide
DYIATNGPLKVGGSCVLSGHNLAKH

SEQ ID NO: 13130 - protein, 25 aa, Artificial Sequence
  Description of Artificial Sequence: Synthetic peptide
NGPLKVGGSCVLSGHNLAKHCLHVV

SEQ ID NO: 13131 - protein, 25 aa, Artificial Sequence
  Description of Artificial Sequence: Synthetic peptide
LESELVIGAVILRGHLRIAGHHLGR

SEQ ID NO: 13132 - protein, 25 aa, Artificial Sequence
  Description of Artificial Sequence: Synthetic peptide
PGNFNKDFYDFAVSKGFFKEGSSVE

SEQ ID NO: 13133 - protein, 25 aa, Artificial Sequence
  Description of Artificial Sequence: Synthetic peptide
KPGNFNKDFYDFAVSKGFFKEGSSV

SEQ ID NO: 13134 - protein, 25 aa, Artificial Sequence
  Description of Artificial Sequence: Synthetic peptide
NKDFYDFAVSKGFFKEGSSVELKHF

SEQ ID NO: 13135 - protein, 25 aa, Artificial Sequence
  Description of Artificial Sequence: Synthetic peptide
FNKDFYDFAVSKGFFKEGSSVELKH

SEQ ID NO: 13136 - protein, 25 aa, Artificial Sequence
  Description of Artificial Sequence: Synthetic peptide
NFNKDFYDFAVSKGFFKEGSSVELK

SEQ ID NO: 13137 - protein, 25 aa, Artificial Sequence
  Description of Artificial Sequence: Synthetic peptide
INCQEPKLGSLVVRCSFYEDFLEYH

SEQ ID NO: 13138 - protein, 25 aa, Artificial Sequence
  Description of Artificial Sequence: Synthetic peptide
NCQEPKLGSLVVRCSFYEDFLEYHD

SEQ ID NO: 13139 - protein, 25 aa, Artificial Sequence
  Description of Artificial Sequence: Synthetic peptide
ANGQVFGLYKNTCVGSDNVTDFNAI

SEQ ID NO: 13140 - protein, 25 aa, Artificial Sequence
  Description of Artificial Sequence: Synthetic peptide
LPFTINCQEPKLGSLVVRCSFYEDF

SEQ ID NO: 13141 - protein, 25 aa, Artificial Sequence
  Description of Artificial Sequence: Synthetic peptide
LACFVLAAVYRINWITGGIAIAMAC

SEQ ID NO: 13142 - protein, 25 aa, Artificial Sequence
  Description of Artificial Sequence: Synthetic peptide
TLACFVLAAVYRINWITGGIAIAMA

SEQ ID NO: 13143 - protein, 25 aa, Artificial Sequence
  Description of Artificial Sequence: Synthetic peptide
QKRTATKAYNVTQAFGRRGPEQTQG

SEQ ID NO: 13144 - protein, 25 aa, Artificial Sequence
  Description of Artificial Sequence: Synthetic peptide
RTATKAYNVTQAFGRRGPEQTQGNF

SEQ ID NO: 13145 - protein, 25 aa, Artificial Sequence
  Description of Artificial Sequence: Synthetic peptide
RQKRTATKAYNVTQAFGRRGPEQTQ

SEQ ID NO: 13146 - protein, 25 aa, Artificial Sequence
  Description of Artificial Sequence: Synthetic peptide
KRTATKAYNVTQAFGRRGPEQTQGN

SEQ ID NO: 13147 - protein, 25 aa, Artificial Sequence
  Description of Artificial Sequence: Synthetic peptide
TEKWESGVKDCVVLHSYFTSDYYQL

SEQ ID NO: 13148 - protein, 25 aa, Artificial Sequence
  Description of Artificial Sequence: Synthetic peptide
YTEKWESGVKDCVVLHSYFTSDYYQ

SEQ ID NO: 13149 - protein, 25 aa, Artificial Sequence
  Description of Artificial Sequence: Synthetic peptide
NDKVAGFAKFLKTNCCRFQEKDEDD

SEQ ID NO: 13150 - protein, 25 aa, Artificial Sequence
  Description of Artificial Sequence: Synthetic peptide
GVEHVTFFIYNKIVDEPEEHVQIHT

SEQ ID NO: 13151 - protein, 25 aa, Artificial Sequence
  Description of Artificial Sequence: Synthetic peptide
TDTGVEHVTFFIYNKIVDEPEEHVQ

SEQ ID NO: 13152 - protein, 25 aa, Artificial Sequence
  Description of Artificial Sequence: Synthetic peptide
TGVEHVTFFIYNKIVDEPEEHVQIH

SEQ ID NO: 13153 - protein, 25 aa, Artificial Sequence
  Description of Artificial Sequence: Synthetic peptide
DTGVEHVTFFIYNKIVDEPEEHVQI

SEQ ID NO: 13154 - protein, 25 aa, Artificial Sequence
  Description of Artificial Sequence: Synthetic peptide
VEHVTFFIYNKIVDEPEEHVQIHTI

SEQ ID NO: 13155 - protein, 25 aa, Artificial Sequence
  Description of Artificial Sequence: Synthetic peptide
TSRYWEPEFYEAMYTPHTVLQAVGA

SEQ ID NO: 13156 - protein, 25 aa, Artificial Sequence
  Description of Artificial Sequence: Synthetic peptide
DNTSRYWEPEFYEAMYTPHTVLQAV

SEQ ID NO: 13157 - protein, 25 aa, Artificial Sequence
  Description of Artificial Sequence: Synthetic peptide
NTSRYWEPEFYEAMYTPHTVLQAVG

SEQ ID NO: 13158 - protein, 25 aa, Artificial Sequence
  Description of Artificial Sequence: Synthetic peptide
SRYWEPEFYEAMYTPHTVLQAVGAC

SEQ ID NO: 13159 - protein, 25 aa, Artificial Sequence
  Description of Artificial Sequence: Synthetic peptide
YWEPEFYEAMYTPHTVLQAVGACVL

SEQ ID NO: 13160 - protein, 25 aa, Artificial Sequence
  Description of Artificial Sequence: Synthetic peptide
RYWEPEFYEAMYTPHTVLQAVGACV

SEQ ID NO: 13161 - protein, 25 aa, Artificial Sequence
  Description of Artificial Sequence: Synthetic peptide
VYRGTTTYKLNVGDYFVLTSHTVMP

SEQ ID NO: 13162 - protein, 25 aa, Artificial Sequence
  Description of Artificial Sequence: Synthetic peptide
TGKIADYNYKLPDDFTGCVIAWNSN

SEQ ID NO: 13163 - protein, 25 aa, Artificial Sequence
  Description of Artificial Sequence: Synthetic peptide
KFLVFLGIITTVAAFHQECSLQSCT

SEQ ID NO: 13164 - protein, 25 aa, Artificial Sequence
  Description of Artificial Sequence: Synthetic peptide
HEVLLAPLLSAGIFGADPIHSLRVC

SEQ ID NO: 13165 - protein, 25 aa, Artificial Sequence
  Description of Artificial Sequence: Synthetic peptide
FNQHEVLLAPLLSAGIFGADPIHSL

SEQ ID NO: 13166 - protein, 25 aa, Artificial Sequence
  Description of Artificial Sequence: Synthetic peptide
LAPLLSAGIFGADPIHSLRVCVDTV

SEQ ID NO: 13167 - protein, 25 aa, Artificial Sequence
  Description of Artificial Sequence: Synthetic peptide
EVLLAPLLSAGIFGADPIHSLRVCV

SEQ ID NO: 13168 - protein, 25 aa, Artificial Sequence
  Description of Artificial Sequence: Synthetic peptide
NQHEVLLAPLLSAGIFGADPIHSLR

SEQ ID NO: 13169 - protein, 25 aa, Artificial Sequence
  Description of Artificial Sequence: Synthetic peptide
ENSYTTTIKPVTYKLDGVVCTEIDP

SEQ ID NO: 13170 - protein, 25 aa, Artificial Sequence
  Description of Artificial Sequence: Synthetic peptide
VLLAPLLSAGIFGADPIHSLRVCVD

SEQ ID NO: 13171 - protein, 25 aa, Artificial Sequence
  Description of Artificial Sequence: Synthetic peptide
LLAPLLSAGIFGADPIHSLRVCVDT

SEQ ID NO: 13172 - protein, 25 aa, Artificial Sequence
  Description of Artificial Sequence: Synthetic peptide
QHEVLLAPLLSAGIFGADPIHSLRV

SEQ ID NO: 13173 - protein, 25 aa, Artificial Sequence
  Description of Artificial Sequence: Synthetic peptide
CYKRNRATRVECTTIVNGVRRSFYV

SEQ ID NO: 13174 - protein, 25 aa, Artificial Sequence
  Description of Artificial Sequence: Synthetic peptide
FRVYSSANNCTFEYVSQPFLMDLEG

SEQ ID NO: 13175 - protein, 25 aa, Artificial Sequence
  Description of Artificial Sequence: Synthetic peptide
KTTLPVNVAFELWAKRNIKPVPEVK

SEQ ID NO: 13176 - protein, 25 aa, Artificial Sequence
  Description of Artificial Sequence: Synthetic peptide
TTLPVNVAFELWAKRNIKPVPEVKI

SEQ ID NO: 13177 - protein, 25 aa, Artificial Sequence
  Description of Artificial Sequence: Synthetic peptide
IPARARVECFDKFKVNSTLEQYVFC

SEQ ID NO: 13178 - protein, 25 aa, Artificial Sequence
  Description of Artificial Sequence: Synthetic peptide
SIKNFKSVLYYQNNVFMSEAKCWTE

SEQ ID NO: 13179 - protein, 25 aa, Artificial Sequence
  Description of Artificial Sequence: Synthetic peptide
FKSVLYYQNNVFMSEAKCWTETDLT

SEQ ID NO: 13180 - protein, 25 aa, Artificial Sequence
  Description of Artificial Sequence: Synthetic peptide
ASIKNFKSVLYYQNNVFMSEAKCWT

SEQ ID NO: 13181 - protein, 25 aa, Artificial Sequence
  Description of Artificial Sequence: Synthetic peptide
KNFKSVLYYQNNVFMSEAKCWTETD

SEQ ID NO: 13182 - protein, 25 aa, Artificial Sequence
  Description of Artificial Sequence: Synthetic peptide
NFKSVLYYQNNVFMSEAKCWTETDL

SEQ ID NO: 13183 - protein, 25 aa, Artificial Sequence
  Description of Artificial Sequence: Synthetic peptide
IKNFKSVLYYQNNVFMSEAKCWTET

SEQ ID NO: 13184 - protein, 25 aa, Artificial Sequence
  Description of Artificial Sequence: Synthetic peptide
VASIKNFKSVLYYQNNVFMSEAKCW

SEQ ID NO: 13185 - protein, 25 aa, Artificial Sequence
  Description of Artificial Sequence: Synthetic peptide
YEDFQENWNTKHSSGVTRELMRELN

SEQ ID NO: 13186 - protein, 25 aa, Artificial Sequence
  Description of Artificial Sequence: Synthetic peptide
EDFQENWNTKHSSGVTRELMRELNG

SEQ ID NO: 13187 - protein, 25 aa, Artificial Sequence
  Description of Artificial Sequence: Synthetic peptide
PYEDFQENWNTKHSSGVTRELMREL

SEQ ID NO: 13188 - protein, 25 aa, Artificial Sequence
  Description of Artificial Sequence: Synthetic peptide
LSVVNARLRAKHYVYIGDPAQLPAP

SEQ ID NO: 13189 - protein, 25 aa, Artificial Sequence
  Description of Artificial Sequence: Synthetic peptide
DTYACWHHSIGFDYVYNPFMIDVQQ

SEQ ID NO: 13190 - protein, 25 aa, Artificial Sequence
  Description of Artificial Sequence: Synthetic peptide
TYACWHHSIGFDYVYNPFMIDVQQW

SEQ ID NO: 13191 - protein, 25 aa, Artificial Sequence
  Description of Artificial Sequence: Synthetic peptide
LTNNVAFQTVKPGNFNKDFYDFAVS

SEQ ID NO: 13192 - protein, 25 aa, Artificial Sequence
  Description of Artificial Sequence: Synthetic peptide
ALTNNVAFQTVKPGNFNKDFYDFAV

SEQ ID NO: 13193 - protein, 25 aa, Artificial Sequence
  Description of Artificial Sequence: Synthetic peptide
VFCTVNALPETTADIVVFDEISMAT

SEQ ID NO: 13194 - protein, 25 aa, Artificial Sequence
  Description of Artificial Sequence: Synthetic peptide
IPTITQMNLKYAISAKNRARTVAGV

SEQ ID NO: 13195 - protein, 25 aa, Artificial Sequence
  Description of Artificial Sequence: Synthetic peptide
LQSADAQSFLNRVCGVSAARLTPCG

SEQ ID NO: 13196 - protein, 25 aa, Artificial Sequence
  Description of Artificial Sequence: Synthetic peptide
MLQSADAQSFLNRVCGVSAARLTPC

SEQ ID NO: 13197 - protein, 25 aa, Artificial Sequence
  Description of Artificial Sequence: Synthetic peptide
SADAQSFLNRVCGVSAARLTPCGTG

SEQ ID NO: 13198 - protein, 25 aa, Artificial Sequence
  Description of Artificial Sequence: Synthetic peptide
QSADAQSFLNRVCGVSAARLTPCGT

SEQ ID NO: 13199 - protein, 25 aa, Artificial Sequence
  Description of Artificial Sequence: Synthetic peptide
PMLQSADAQSFLNRVCGVSAARLTP

SEQ ID NO: 13200 - protein, 25 aa, Artificial Sequence
  Description of Artificial Sequence: Synthetic peptide
TNNVAFQTVKPGNFNKDFYDFAVSK

SEQ ID NO: 13201 - protein, 25 aa, Artificial Sequence
  Description of Artificial Sequence: Synthetic peptide
NNVAFQTVKPGNFNKDFYDFAVSKG

SEQ ID NO: 13202 - protein, 25 aa, Artificial Sequence
  Description of Artificial Sequence: Synthetic peptide
NVAFQTVKPGNFNKDFYDFAVSKGF

SEQ ID NO: 13203 - protein, 25 aa, Artificial Sequence
  Description of Artificial Sequence: Synthetic peptide
RNVIPTITQMNLKYAISAKNRARTV

SEQ ID NO: 13204 - protein, 25 aa, Artificial Sequence
  Description of Artificial Sequence: Synthetic peptide
SASAFFGMSRIGMEVTPSGTWLTYT

SEQ ID NO: 13205 - protein, 25 aa, Artificial Sequence
  Description of Artificial Sequence: Synthetic peptide
DVEWKFYDAQPCSDKAYKIEELFYS

SEQ ID NO: 13206 - protein, 25 aa, Artificial Sequence
  Description of Artificial Sequence: Synthetic peptide
QADVEWKFYDAQPCSDKAYKIEELF

SEQ ID NO: 13207 - protein, 25 aa, Artificial Sequence
  Description of Artificial Sequence: Synthetic peptide
VEWKFYDAQPCSDKAYKIEELFYSY

SEQ ID NO: 13208 - protein, 25 aa, Artificial Sequence
  Description of Artificial Sequence: Synthetic peptide
ADVEWKFYDAQPCSDKAYKIEELFY

SEQ ID NO: 13209 - protein, 25 aa, Artificial Sequence
  Description of Artificial Sequence: Synthetic peptide
FRELGVVHNQDVNLHSSRLSFKELL

SEQ ID NO: 13210 - protein, 25 aa, Artificial Sequence
  Description of Artificial Sequence: Synthetic peptide
RELGVVHNQDVNLHSSRLSFKELLV

SEQ ID NO: 13211 - protein, 25 aa, Artificial Sequence
  Description of Artificial Sequence: Synthetic peptide
ELGVVHNQDVNLHSSRLSFKELLVY

SEQ ID NO: 13212 - protein, 25 aa, Artificial Sequence
  Description of Artificial Sequence: Synthetic peptide
VVHNQDVNLHSSRLSFKELLVYAAD

SEQ ID NO: 13213 - protein, 25 aa, Artificial Sequence
  Description of Artificial Sequence: Synthetic peptide
LGVVHNQDVNLHSSRLSFKELLVYA

SEQ ID NO: 13214 - protein, 25 aa, Artificial Sequence
  Description of Artificial Sequence: Synthetic peptide
GVVHNQDVNLHSSRLSFKELLVYAA

SEQ ID NO: 13215 - protein, 25 aa, Artificial Sequence
  Description of Artificial Sequence: Synthetic peptide
STFEEAALCTFLLNKEMYLKLRSDV

SEQ ID NO: 13216 - protein, 25 aa, Artificial Sequence
  Description of Artificial Sequence: Synthetic peptide
SFSTFEEAALCTFLLNKEMYLKLRS

SEQ ID NO: 13217 - protein, 25 aa, Artificial Sequence
  Description of Artificial Sequence: Synthetic peptide
FSTFEEAALCTFLLNKEMYLKLRSD

SEQ ID NO: 13218 - protein, 25 aa, Artificial Sequence
  Description of Artificial Sequence: Synthetic peptide
TFEEAALCTFLLNKEMYLKLRSDVL

SEQ ID NO: 13219 - protein, 25 aa, Artificial Sequence
  Description of Artificial Sequence: Synthetic peptide
FEEAALCTFLLNKEMYLKLRSDVLL

SEQ ID NO: 13220 - protein, 25 aa, Artificial Sequence
  Description of Artificial Sequence: Synthetic peptide
AVTANVNALLSTDGNKIADKYVRNL

SEQ ID NO: 13221 - protein, 25 aa, Artificial Sequence
  Description of Artificial Sequence: Synthetic peptide
QAVTANVNALLSTDGNKIADKYVRN

SEQ ID NO: 13222 - protein, 25 aa, Artificial Sequence
  Description of Artificial Sequence: Synthetic peptide
SAFVNLKQLPFFYYSDSPCESHGKQ

SEQ ID NO: 13223 - protein, 25 aa, Artificial Sequence
  Description of Artificial Sequence: Synthetic peptide
TKRNVIPTITQMNLKYAISAKNRAR

SEQ ID NO: 13224 - protein, 25 aa, Artificial Sequence
  Description of Artificial Sequence: Synthetic peptide
YAAVINGDRWFLNRFTTTLNDFNLV

SEQ ID NO: 13225 - protein, 25 aa, Artificial Sequence
  Description of Artificial Sequence: Synthetic peptide
AAVINGDRWFLNRFTTTLNDFNLVA

SEQ ID NO: 13226 - protein, 25 aa, Artificial Sequence
  Description of Artificial Sequence: Synthetic peptide
AVINGDRWFLNRFTTTLNDFNLVAM

SEQ ID NO: 13227 - protein, 25 aa, Artificial Sequence
  Description of Artificial Sequence: Synthetic peptide
WLYAAVINGDRWFLNRFTTTLNDFN

SEQ ID NO: 13228 - protein, 25 aa, Artificial Sequence
  Description of Artificial Sequence: Synthetic peptide
LYAAVINGDRWFLNRFTTTLNDFNL

SEQ ID NO: 13229 - protein, 25 aa, Artificial Sequence
  Description of Artificial Sequence: Synthetic peptide
ICQAVTANVNALLSTDGNKIADKYV

SEQ ID NO: 13230 - protein, 25 aa, Artificial Sequence
  Description of Artificial Sequence: Synthetic peptide
NICQAVTANVNALLSTDGNKIADKY

SEQ ID NO: 13231 - protein, 25 aa, Artificial Sequence
  Description of Artificial Sequence: Synthetic peptide
VFNICQAVTANVNALLSTDGNKIAD

SEQ ID NO: 13232 - protein, 25 aa, Artificial Sequence
  Description of Artificial Sequence: Synthetic peptide
FNICQAVTANVNALLSTDGNKIADK

SEQ ID NO: 13233 - protein, 25 aa, Artificial Sequence
  Description of Artificial Sequence: Synthetic peptide
YIINLIIKNLSKSLTENKYSQLDEE

SEQ ID NO: 13234 - protein, 25 aa, Artificial Sequence
  Description of Artificial Sequence: Synthetic peptide
IINLIIKNLSKSLTENKYSQLDEEQ

SEQ ID NO: 13235 - protein, 25 aa, Artificial Sequence
  Description of Artificial Sequence: Synthetic peptide
INLIIKNLSKSLTENKYSQLDEEQP

SEQ ID NO: 13236 - protein, 25 aa, Artificial Sequence
  Description of Artificial Sequence: Synthetic peptide
DYIINLIIKNLSKSLTENKYSQLDE

SEQ ID NO: 13237 - protein, 25 aa, Artificial Sequence
  Description of Artificial Sequence: Synthetic peptide
DFQVTIAEILLIIMRTFKVSIWNLD

SEQ ID NO: 13238 - protein, 25 aa, Artificial Sequence
  Description of Artificial Sequence: Synthetic peptide
YFNSVCRLMKTIGPDMFLGTCRRCP

SEQ ID NO: 13239 - protein, 25 aa, Artificial Sequence
  Description of Artificial Sequence: Synthetic peptide
EYFNSVCRLMKTIGPDMFLGTCRRC

SEQ ID NO: 13240 - protein, 25 aa, Artificial Sequence
  Description of Artificial Sequence: Synthetic peptide
PEYFNSVCRLMKTIGPDMFLGTCRR

SEQ ID NO: 13241 - protein, 25 aa, Artificial Sequence
  Description of Artificial Sequence: Synthetic peptide
FNSVCRLMKTIGPDMFLGTCRRCPA

SEQ ID NO: 13242 - protein, 25 aa, Artificial Sequence
  Description of Artificial Sequence: Synthetic peptide
PAMHAASGNLLLDKRTTCFSVAALT

SEQ ID NO: 13243 - protein, 25 aa, Artificial Sequence
  Description of Artificial Sequence: Synthetic peptide
SVYAWNRKRISNCVADYSVLYNSAS

SEQ ID NO: 13244 - protein, 25 aa, Artificial Sequence
  Description of Artificial Sequence: Synthetic peptide
VYAWNRKRISNCVADYSVLYNSASF

SEQ ID NO: 13245 - protein, 25 aa, Artificial Sequence
  Description of Artificial Sequence: Synthetic peptide
GTTLPKGFYAEGSRGGSQASSRSSS

SEQ ID NO: 13246 - protein, 25 aa, Artificial Sequence
  Description of Artificial Sequence: Synthetic peptide
TTLPKGFYAEGSRGGSQASSRSSSR

SEQ ID NO: 13247 - protein, 25 aa, Artificial Sequence
  Description of Artificial Sequence: Synthetic peptide
SQPFLMDLEGKQGNFKNLREFVFKN

SEQ ID NO: 13248 - protein, 25 aa, Artificial Sequence
  Description of Artificial Sequence: Synthetic peptide
KYKYFSGAMDTTSYREAACCHLAKA

SEQ ID NO: 13249 - protein, 25 aa, Artificial Sequence
  Description of Artificial Sequence: Synthetic peptide
FEPSTQYEYGTEDDYQGKPLEFGAT

SEQ ID NO: 13250 - protein, 25 aa, Artificial Sequence
  Description of Artificial Sequence: Synthetic peptide
LYNKYKYFSGAMDTTSYREAACCHL

SEQ ID NO: 13251 - protein, 25 aa, Artificial Sequence
  Description of Artificial Sequence: Synthetic peptide
EEFEPSTQYEYGTEDDYQGKPLEFG

SEQ ID NO: 13252 - protein, 25 aa, Artificial Sequence
  Description of Artificial Sequence: Synthetic peptide
YNKYKYFSGAMDTTSYREAACCHLA

SEQ ID NO: 13253 - protein, 25 aa, Artificial Sequence
  Description of Artificial Sequence: Synthetic peptide
EEEFEPSTQYEYGTEDDYQGKPLEF

SEQ ID NO: 13254 - protein, 25 aa, Artificial Sequence
  Description of Artificial Sequence: Synthetic peptide
YKYFSGAMDTTSYREAACCHLAKAL

SEQ ID NO: 13255 - protein, 25 aa, Artificial Sequence
  Description of Artificial Sequence: Synthetic peptide
EEEEFEPSTQYEYGTEDDYQGKPLE

SEQ ID NO: 13256 - protein, 25 aa, Artificial Sequence
  Description of Artificial Sequence: Synthetic peptide
ALYNKYKYFSGAMDTTSYREAACCH

SEQ ID NO: 13257 - protein, 25 aa, Artificial Sequence
  Description of Artificial Sequence: Synthetic peptide
EFEPSTQYEYGTEDDYQGKPLEFGA

SEQ ID NO: 13258 - protein, 25 aa, Artificial Sequence
  Description of Artificial Sequence: Synthetic peptide
NKYKYFSGAMDTTSYREAACCHLAK

SEQ ID NO: 13259 - protein, 25 aa, Artificial Sequence
  Description of Artificial Sequence: Synthetic peptide
GNYNYLYRLFRKSNLKPFERDISTE

SEQ ID NO: 13260 - protein, 25 aa, Artificial Sequence
  Description of Artificial Sequence: Synthetic peptide
KKRWQLALSKGVHFVCNLLLLFVTV

SEQ ID NO: 13261 - protein, 25 aa, Artificial Sequence
  Description of Artificial Sequence: Synthetic peptide
TRQVVNVVTTKIALKGGKIVNNWLK

SEQ ID NO: 13262 - protein, 25 aa, Artificial Sequence
  Description of Artificial Sequence: Synthetic peptide
LVDFQVTIAEILLIIMRTFKVSIWN

SEQ ID NO: 13263 - protein, 25 aa, Artificial Sequence
  Description of Artificial Sequence: Synthetic peptide
AASGNLLLDKRTTCFSVAALTNNVA

SEQ ID NO: 13264 - protein, 25 aa, Artificial Sequence
  Description of Artificial Sequence: Synthetic peptide
ASGNLLLDKRTTCFSVAALTNNVAF

SEQ ID NO: 13265 - protein, 25 aa, Artificial Sequence
  Description of Artificial Sequence: Synthetic peptide
VYYHKNNKSWMESEFRVYSSANNCT

SEQ ID NO: 13266 - protein, 25 aa, Artificial Sequence
  Description of Artificial Sequence: Synthetic peptide
FLGVYYHKNNKSWMESEFRVYSSAN

SEQ ID NO: 13267 - protein, 25 aa, Artificial Sequence
  Description of Artificial Sequence: Synthetic peptide
YKRDAPAHISTIGVCSMTDIAKKPT

SEQ ID NO: 13268 - protein, 25 aa, Artificial Sequence
  Description of Artificial Sequence: Synthetic peptide
DYKRDAPAHISTIGVCSMTDIAKKP

SEQ ID NO: 13269 - protein, 25 aa, Artificial Sequence
  Description of Artificial Sequence: Synthetic peptide
TQTTETAHSCNVNRFNVAITRAKVG

SEQ ID NO: 13270 - protein, 25 aa, Artificial Sequence
  Description of Artificial Sequence: Synthetic peptide
TTETAHSCNVNRFNVAITRAKVGIL

SEQ ID NO: 13271 - protein, 25 aa, Artificial Sequence
  Description of Artificial Sequence: Synthetic peptide
QTTETAHSCNVNRFNVAITRAKVGI

SEQ ID NO: 13272 - protein, 25 aa, Artificial Sequence
  Description of Artificial Sequence: Synthetic peptide
KPNELSRVLGLKTLATHGLAAVNSV

SEQ ID NO: 13273 - protein, 25 aa, Artificial Sequence
  Description of Artificial Sequence: Synthetic peptide
IKKPNELSRVLGLKTLATHGLAAVN

SEQ ID NO: 13274 - protein, 25 aa, Artificial Sequence
  Description of Artificial Sequence: Synthetic peptide
LTIKKPNELSRVLGLKTLATHGLAA

SEQ ID NO: 13275 - protein, 25 aa, Artificial Sequence
  Description of Artificial Sequence: Synthetic peptide
TIKKPNELSRVLGLKTLATHGLAAV

SEQ ID NO: 13276 - protein, 25 aa, Artificial Sequence
  Description of Artificial Sequence: Synthetic peptide
NELSRVLGLKTLATHGLAAVNSVPW

SEQ ID NO: 13277 - protein, 25 aa, Artificial Sequence
  Description of Artificial Sequence: Synthetic peptide
PNELSRVLGLKTLATHGLAAVNSVP

SEQ ID NO: 13278 - protein, 25 aa, Artificial Sequence
  Description of Artificial Sequence: Synthetic peptide
SLTIKKPNELSRVLGLKTLATHGLA

SEQ ID NO: 13279 - protein, 25 aa, Artificial Sequence
  Description of Artificial Sequence: Synthetic peptide
KKPNELSRVLGLKTLATHGLAAVNS

SEQ ID NO: 13280 - protein, 25 aa, Artificial Sequence
  Description of Artificial Sequence: Synthetic peptide
ELSRVLGLKTLATHGLAAVNSVPWD

SEQ ID NO: 13281 - protein, 25 aa, Artificial Sequence
  Description of Artificial Sequence: Synthetic peptide
LAYILFTRFFYVLGLAAIMQLFFSY

SEQ ID NO: 13282 - protein, 25 aa, Artificial Sequence
  Description of Artificial Sequence: Synthetic peptide
ILFTRFFYVLGLAAIMQLFFSYFAV

SEQ ID NO: 13283 - protein, 25 aa, Artificial Sequence
  Description of Artificial Sequence: Synthetic peptide
AYILFTRFFYVLGLAAIMQLFFSYF

SEQ ID NO: 13284 - protein, 25 aa, Artificial Sequence
  Description of Artificial Sequence: Synthetic peptide
YILFTRFFYVLGLAAIMQLFFSYFA

SEQ ID NO: 13285 - protein, 25 aa, Artificial Sequence
  Description of Artificial Sequence: Synthetic peptide
WFLAYILFTRFFYVLGLAAIMQLFF

SEQ ID NO: 13286 - protein, 25 aa, Artificial Sequence
  Description of Artificial Sequence: Synthetic peptide
FLAYILFTRFFYVLGLAAIMQLFFS

SEQ ID NO: 13287 - protein, 25 aa, Artificial Sequence
  Description of Artificial Sequence: Synthetic peptide
EWFLAYILFTRFFYVLGLAAIMQLF

SEQ ID NO: 13288 - protein, 25 aa, Artificial Sequence
  Description of Artificial Sequence: Synthetic peptide
AEWFLAYILFTRFFYVLGLAAIMQL

SEQ ID NO: 13289 - protein, 25 aa, Artificial Sequence
  Description of Artificial Sequence: Synthetic peptide
VAEWFLAYILFTRFFYVLGLAAIMQ

SEQ ID NO: 13290 - protein, 25 aa, Artificial Sequence
  Description of Artificial Sequence: Synthetic peptide
DPFLGVYYHKNNKSWMESEFRVYSS

SEQ ID NO: 13291 - protein, 25 aa, Artificial Sequence
  Description of Artificial Sequence: Synthetic peptide
QLTGYKKPASRELKVTFFPDLNGDV

SEQ ID NO: 13292 - protein, 25 aa, Artificial Sequence
  Description of Artificial Sequence: Synthetic peptide
NQLTGYKKPASRELKVTFFPDLNGD

SEQ ID NO: 13293 - protein, 25 aa, Artificial Sequence
  Description of Artificial Sequence: Synthetic peptide
DGKMKDLSPRWYFYYLGTGPEAGLP

SEQ ID NO: 13294 - protein, 25 aa, Artificial Sequence
  Description of Artificial Sequence: Synthetic peptide
YICGDSTECSNLLLQYGSFCTQLNR

SEQ ID NO: 13295 - protein, 25 aa, Artificial Sequence
  Description of Artificial Sequence: Synthetic peptide
LFNKVTLADAGFIKQYGDCLGDIAA

SEQ ID NO: 13296 - protein, 25 aa, Artificial Sequence
  Description of Artificial Sequence: Synthetic peptide
LLFNKVTLADAGFIKQYGDCLGDIA

SEQ ID NO: 13297 - protein, 25 aa, Artificial Sequence
  Description of Artificial Sequence: Synthetic peptide
ALVSDVGDSAEVAVKMFDAYVNTFS

SEQ ID NO: 13298 - protein, 25 aa, Artificial Sequence
  Description of Artificial Sequence: Synthetic peptide
LVSDVGDSAEVAVKMFDAYVNTFSS

SEQ ID NO: 13299 - protein, 25 aa, Artificial Sequence
  Description of Artificial Sequence: Synthetic peptide
VVFVLWAHGFELTSMKYFVKIGPER

SEQ ID NO: 13300 - protein, 25 aa, Artificial Sequence
  Description of Artificial Sequence: Synthetic peptide
ILLIIMRTFKVSIWNLDYIINLIIK

SEQ ID NO: 13301 - protein, 25 aa, Artificial Sequence
  Description of Artificial Sequence: Synthetic peptide
AEILLIIMRTFKVSIWNLDYIINLI

SEQ ID NO: 13302 - protein, 25 aa, Artificial Sequence
  Description of Artificial Sequence: Synthetic peptide
LLIIMRTFKVSIWNLDYIINLIIKN

SEQ ID NO: 13303 - protein, 25 aa, Artificial Sequence
  Description of Artificial Sequence: Synthetic peptide
EILLIIMRTFKVSIWNLDYIINLII

SEQ ID NO: 13304 - protein, 25 aa, Artificial Sequence
  Description of Artificial Sequence: Synthetic peptide
KCTLKSFTVEKGIYQTSNFRVQPTE

SEQ ID NO: 13305 - protein, 25 aa, Artificial Sequence
  Description of Artificial Sequence: Synthetic peptide
DKSVYYTSNPTTFHLDGEVITFDNL

SEQ ID NO: 13306 - protein, 25 aa, Artificial Sequence
  Description of Artificial Sequence: Synthetic peptide
IKGLNNLNRGMVLGSLAATVRLQAG

SEQ ID NO: 13307 - protein, 25 aa, Artificial Sequence
  Description of Artificial Sequence: Synthetic peptide
STDVVYRAFDIYNDKVAGFAKFLKT

SEQ ID NO: 13308 - protein, 25 aa, Artificial Sequence
  Description of Artificial Sequence: Synthetic peptide
SLENVAFNVVNKGHFDGQQGEVPVS

SEQ ID NO: 13309 - protein, 25 aa, Artificial Sequence
  Description of Artificial Sequence: Synthetic peptide
LENVAFNVVNKGHFDGQQGEVPVSI

SEQ ID NO: 13310 - protein, 25 aa, Artificial Sequence
  Description of Artificial Sequence: Synthetic peptide
SKKPRQKRTATKAYNVTQAFGRRGP

SEQ ID NO: 13311 - protein, 25 aa, Artificial Sequence
  Description of Artificial Sequence: Synthetic peptide
ASKKPRQKRTATKAYNVTQAFGRRG

SEQ ID NO: 13312 - protein, 25 aa, Artificial Sequence
  Description of Artificial Sequence: Synthetic peptide
LYFIKGLNNLNRGMVLGSLAATVRL

SEQ ID NO: 13313 - protein, 25 aa, Artificial Sequence
  Description of Artificial Sequence: Synthetic peptide
YLYFIKGLNNLNRGMVLGSLAATVR

SEQ ID NO: 13314 - protein, 25 aa, Artificial Sequence
  Description of Artificial Sequence: Synthetic peptide
DMILSLLSKGRLIIRENNRVVISSD

SEQ ID NO: 13315 - protein, 25 aa, Artificial Sequence
  Description of Artificial Sequence: Synthetic peptide
PSGTWLTYTGAIKLDDKDPNFKDQV

SEQ ID NO: 13316 - protein, 25 aa, Artificial Sequence
  Description of Artificial Sequence: Synthetic peptide
SRVLGLKTLATHGLAAVNSVPWDTI

SEQ ID NO: 13317 - protein, 25 aa, Artificial Sequence
  Description of Artificial Sequence: Synthetic peptide
RVLGLKTLATHGLAAVNSVPWDTIA

SEQ ID NO: 13318 - protein, 25 aa, Artificial Sequence
  Description of Artificial Sequence: Synthetic peptide
VLGLKTLATHGLAAVNSVPWDTIAN

SEQ ID NO: 13319 - protein, 25 aa, Artificial Sequence
  Description of Artificial Sequence: Synthetic peptide
VICTSEDMLNPNYEDLLIRKSNHNF

SEQ ID NO: 13320 - protein, 25 aa, Artificial Sequence
  Description of Artificial Sequence: Synthetic peptide
CTSEDMLNPNYEDLLIRKSNHNFLV

SEQ ID NO: 13321 - protein, 25 aa, Artificial Sequence
  Description of Artificial Sequence: Synthetic peptide
ICTSEDMLNPNYEDLLIRKSNHNFL

SEQ ID NO: 13322 - protein, 25 aa, Artificial Sequence
  Description of Artificial Sequence: Synthetic peptide
YDNKLKAHKDKSAQCFKMFYKGVIT

SEQ ID NO: 13323 - protein, 25 aa, Artificial Sequence
  Description of Artificial Sequence: Synthetic peptide
NLLLLFVTVYSHLLLVAAGLEAPFL

SEQ ID NO: 13324 - protein, 25 aa, Artificial Sequence
  Description of Artificial Sequence: Synthetic peptide
VRNLQHRLYECLYRNRDVDTDFVNE

SEQ ID NO: 13325 - protein, 25 aa, Artificial Sequence
  Description of Artificial Sequence: Synthetic peptide
ECSNLLLQYGSFCTQLNRALTGIAV

SEQ ID NO: 13326 - protein, 25 aa, Artificial Sequence
  Description of Artificial Sequence: Synthetic peptide
VFKNIDGYFKIYSKHTPINLVRDLP

SEQ ID NO: 13327 - protein, 25 aa, Artificial Sequence
  Description of Artificial Sequence: Synthetic peptide
REFVFKNIDGYFKIYSKHTPINLVR

SEQ ID NO: 13328 - protein, 25 aa, Artificial Sequence
  Description of Artificial Sequence: Synthetic peptide
FVFKNIDGYFKIYSKHTPINLVRDL

SEQ ID NO: 13329 - protein, 25 aa, Artificial Sequence
  Description of Artificial Sequence: Synthetic peptide
FKNIDGYFKIYSKHTPINLVRDLPQ

SEQ ID NO: 13330 - protein, 25 aa, Artificial Sequence
  Description of Artificial Sequence: Synthetic peptide
EFVFKNIDGYFKIYSKHTPINLVRD

SEQ ID NO: 13331 - protein, 25 aa, Artificial Sequence
  Description of Artificial Sequence: Synthetic peptide
LREFVFKNIDGYFKIYSKHTPINLV

SEQ ID NO: 13332 - protein, 25 aa, Artificial Sequence
  Description of Artificial Sequence: Synthetic peptide
TPSFKKGAKLLHKPIVWHVNNATNK

SEQ ID NO: 13333 - protein, 25 aa, Artificial Sequence
  Description of Artificial Sequence: Synthetic peptide
PSFKKGAKLLHKPIVWHVNNATNKA

SEQ ID NO: 13334 - protein, 25 aa, Artificial Sequence
  Description of Artificial Sequence: Synthetic peptide
PNMLRIMASLVLARKHTTCCSLSHR

SEQ ID NO: 13335 - protein, 25 aa, Artificial Sequence
  Description of Artificial Sequence: Synthetic peptide
RLRAKHYVYIGDPAQLPAPRTLLTK

SEQ ID NO: 13336 - protein, 25 aa, Artificial Sequence
  Description of Artificial Sequence: Synthetic peptide
ARLRAKHYVYIGDPAQLPAPRTLLT

SEQ ID NO: 13337 - protein, 25 aa, Artificial Sequence
  Description of Artificial Sequence: Synthetic peptide
LRAKHYVYIGDPAQLPAPRTLLTKG

SEQ ID NO: 13338 - protein, 25 aa, Artificial Sequence
  Description of Artificial Sequence: Synthetic peptide
APLIELCVDEAGSKSPIQYIDIGNY

SEQ ID NO: 13339 - protein, 25 aa, Artificial Sequence
  Description of Artificial Sequence: Synthetic peptide
LNRYFRLTLGVYDYLVSTQEFRYMN

SEQ ID NO: 13340 - protein, 25 aa, Artificial Sequence
  Description of Artificial Sequence: Synthetic peptide
NRYFRLTLGVYDYLVSTQEFRYMNS

SEQ ID NO: 13341 - protein, 25 aa, Artificial Sequence
  Description of Artificial Sequence: Synthetic peptide
TSDLATNNLVVMAYITGGVVQLTSQ

SEQ ID NO: 13342 - protein, 25 aa, Artificial Sequence
  Description of Artificial Sequence: Synthetic peptide
SNHNFLVQAGNVQLRVIGHSMQNCV

SEQ ID NO: 13343 - protein, 25 aa, Artificial Sequence
  Description of Artificial Sequence: Synthetic peptide
NHNFLVQAGNVQLRVIGHSMQNCVL

SEQ ID NO: 13344 - protein, 25 aa, Artificial Sequence
  Description of Artificial Sequence: Synthetic peptide
HNFLVQAGNVQLRVIGHSMQNCVLK

SEQ ID NO: 13345 - protein, 25 aa, Artificial Sequence
  Description of Artificial Sequence: Synthetic peptide
YRARAGEAANFCALILAYCNKTVGE

SEQ ID NO: 13346 - protein, 25 aa, Artificial Sequence
  Description of Artificial Sequence: Synthetic peptide
RARAGEAANFCALILAYCNKTVGEL

SEQ ID NO: 13347 - protein, 25 aa, Artificial Sequence
  Description of Artificial Sequence: Synthetic peptide
ARAGEAANFCALILAYCNKTVGELG

SEQ ID NO: 13348 - protein, 25 aa, Artificial Sequence
  Description of Artificial Sequence: Synthetic peptide
SCVLSGHNLAKHCLHVVGPNVNKGE

SEQ ID NO: 13349 - protein, 25 aa, Artificial Sequence
  Description of Artificial Sequence: Synthetic peptide
CVLSGHNLAKHCLHVVGPNVNKGED

SEQ ID NO: 13350 - protein, 25 aa, Artificial Sequence
  Description of Artificial Sequence: Synthetic peptide
TQYEYGTEDDYQGKPLEFGATSAAL

SEQ ID NO: 13351 - protein, 25 aa, Artificial Sequence
  Description of Artificial Sequence: Synthetic peptide
GSCVLSGHNLAKHCLHVVGPNVNKG

SEQ ID NO: 13352 - protein, 25 aa, Artificial Sequence
  Description of Artificial Sequence: Synthetic peptide
FGPTYLDGADVTKIKPHNSHEGKTF

SEQ ID NO: 13353 - protein, 25 aa, Artificial Sequence
  Description of Artificial Sequence: Synthetic peptide
AHISTIGVCSMTDIAKKPTETICAP

SEQ ID NO: 13354 - protein, 25 aa, Artificial Sequence
  Description of Artificial Sequence: Synthetic peptide
PAHISTIGVCSMTDIAKKPTETICA

SEQ ID NO: 13355 - protein, 25 aa, Artificial Sequence
  Description of Artificial Sequence: Synthetic peptide
SQRGGSYTNDKACPLIAAVITREVG

SEQ ID NO: 13356 - protein, 25 aa, Artificial Sequence
  Description of Artificial Sequence: Synthetic peptide
RDVLVRGFGDSVEEVLSEARQHLKD

SEQ ID NO: 13357 - protein, 25 aa, Artificial Sequence
  Description of Artificial Sequence: Synthetic peptide
QPELDSFKEELDKYFKNHTSPDVDL

SEQ ID NO: 13358 - protein, 25 aa, Artificial Sequence
  Description of Artificial Sequence: Synthetic peptide
VRDVLVRGFGDSVEEVLSEARQHLK

SEQ ID NO: 13359 - protein, 25 aa, Artificial Sequence
  Description of Artificial Sequence: Synthetic peptide
LQPELDSFKEELDKYFKNHTSPDVD

SEQ ID NO: 13360 - protein, 25 aa, Artificial Sequence
  Description of Artificial Sequence: Synthetic peptide
RNARNGVLITEGSVKGLQPSVGPKQ

SEQ ID NO: 13361 - protein, 25 aa, Artificial Sequence
  Description of Artificial Sequence: Synthetic peptide
ARNGVLITEGSVKGLQPSVGPKQAS

SEQ ID NO: 13362 - protein, 25 aa, Artificial Sequence
  Description of Artificial Sequence: Synthetic peptide
NARNGVLITEGSVKGLQPSVGPKQA

SEQ ID NO: 13363 - protein, 25 aa, Artificial Sequence
  Description of Artificial Sequence: Synthetic peptide
KLDGVVCTEIDPKLDNYYKKDNSYF

SEQ ID NO: 13364 - protein, 25 aa, Artificial Sequence
  Description of Artificial Sequence: Synthetic peptide
PTGVHAGTDLEGNFYGPFVDRQTAQ

SEQ ID NO: 13365 - protein, 25 aa, Artificial Sequence
  Description of Artificial Sequence: Synthetic peptide
TGVHAGTDLEGNFYGPFVDRQTAQA

SEQ ID NO: 13366 - protein, 25 aa, Artificial Sequence
  Description of Artificial Sequence: Synthetic peptide
TIKPVTYKLDGVVCTEIDPKLDNYY

SEQ ID NO: 13367 - protein, 25 aa, Artificial Sequence
  Description of Artificial Sequence: Synthetic peptide
YKLDGVVCTEIDPKLDNYYKKDNSY

SEQ ID NO: 13368 - protein, 25 aa, Artificial Sequence
  Description of Artificial Sequence: Synthetic peptide
VTYKLDGVVCTEIDPKLDNYYKKDN

SEQ ID NO: 13369 - protein, 25 aa, Artificial Sequence
  Description of Artificial Sequence: Synthetic peptide
GVHAGTDLEGNFYGPFVDRQTAQAA

SEQ ID NO: 13370 - protein, 25 aa, Artificial Sequence
  Description of Artificial Sequence: Synthetic peptide
IKPVTYKLDGVVCTEIDPKLDNYYK

SEQ ID NO: 13371 - protein, 25 aa, Artificial Sequence
  Description of Artificial Sequence: Synthetic peptide
PVTYKLDGVVCTEIDPKLDNYYKKD

SEQ ID NO: 13372 - protein, 25 aa, Artificial Sequence
  Description of Artificial Sequence: Synthetic peptide
KPVTYKLDGVVCTEIDPKLDNYYKK

SEQ ID NO: 13373 - protein, 25 aa, Artificial Sequence
  Description of Artificial Sequence: Synthetic peptide
LDGVVCTEIDPKLDNYYKKDNSYFT

SEQ ID NO: 13374 - protein, 25 aa, Artificial Sequence
  Description of Artificial Sequence: Synthetic peptide
SDGTGTIYTELEPPCRFVTDTPKGP

SEQ ID NO: 13375 - protein, 25 aa, Artificial Sequence
  Description of Artificial Sequence: Synthetic peptide
TYKLDGVVCTEIDPKLDNYYKKDNS

SEQ ID NO: 13376 - protein, 25 aa, Artificial Sequence
  Description of Artificial Sequence: Synthetic peptide
DNALAYYNTTKGGRFVLALLSDLQD

SEQ ID NO: 13377 - protein, 25 aa, Artificial Sequence
  Description of Artificial Sequence: Synthetic peptide
KSDGTGTIYTELEPPCRFVTDTPKG

SEQ ID NO: 13378 - protein, 25 aa, Artificial Sequence
  Description of Artificial Sequence: Synthetic peptide
TVTLLPAADLDDFSKQLQQSMSSAD

SEQ ID NO: 13379 - protein, 25 aa, Artificial Sequence
  Description of Artificial Sequence: Synthetic peptide
HDFFKFRIDGDMVPHISRQRLTKYT

SEQ ID NO: 13380 - protein, 25 aa, Artificial Sequence
  Description of Artificial Sequence: Synthetic peptide
IDGDMVPHISRQRLTKYTMADLVYA

SEQ ID NO: 13381 - protein, 25 aa, Artificial Sequence
  Description of Artificial Sequence: Synthetic peptide
FAFACPDGVKHVYQLRARSVSPKLF

SEQ ID NO: 13382 - protein, 25 aa, Artificial Sequence
  Description of Artificial Sequence: Synthetic peptide
FACPDGVKHVYQLRARSVSPKLFIR

SEQ ID NO: 13383 - protein, 25 aa, Artificial Sequence
  Description of Artificial Sequence: Synthetic peptide
ACPDGVKHVYQLRARSVSPKLFIRQ

SEQ ID NO: 13384 - protein, 25 aa, Artificial Sequence
  Description of Artificial Sequence: Synthetic peptide
QFAFACPDGVKHVYQLRARSVSPKL

SEQ ID NO: 13385 - protein, 25 aa, Artificial Sequence
  Description of Artificial Sequence: Synthetic peptide
AFACPDGVKHVYQLRARSVSPKLFI

SEQ ID NO: 13386 - protein, 25 aa, Artificial Sequence
  Description of Artificial Sequence: Synthetic peptide
CPDGVKHVYQLRARSVSPKLFIRQE

SEQ ID NO: 13387 - protein, 25 aa, Artificial Sequence
  Description of Artificial Sequence: Synthetic peptide
LDNLRANNTKGSLPINVIVFDGKSK

SEQ ID NO: 13388 - protein, 25 aa, Artificial Sequence
  Description of Artificial Sequence: Synthetic peptide
FISPYNSQNAVASKILGLPTQTVDS

SEQ ID NO: 13389 - protein, 25 aa, Artificial Sequence
  Description of Artificial Sequence: Synthetic peptide
RKAVFISPYNSQNAVASKILGLPTQ

SEQ ID NO: 13390 - protein, 25 aa, Artificial Sequence
  Description of Artificial Sequence: Synthetic peptide
LTRNPAWRKAVFISPYNSQNAVASK

SEQ ID NO: 13391 - protein, 25 aa, Artificial Sequence
  Description of Artificial Sequence: Synthetic peptide
AEIPKEEVKPFITESKPSVEQRKQD

SEQ ID NO: 13392 - protein, 25 aa, Artificial Sequence
  Description of Artificial Sequence: Synthetic peptide
PKEEVKPFITESKPSVEQRKQDDKK

SEQ ID NO: 13393 - protein, 25 aa, Artificial Sequence
  Description of Artificial Sequence: Synthetic peptide
EIPKEEVKPFITESKPSVEQRKQDD

SEQ ID NO: 13394 - protein, 25 aa, Artificial Sequence
  Description of Artificial Sequence: Synthetic peptide
KIAEIPKEEVKPFITESKPSVEQRK

SEQ ID NO: 13395 - protein, 25 aa, Artificial Sequence
  Description of Artificial Sequence: Synthetic peptide
KEEVKPFITESKPSVEQRKQDDKKI

SEQ ID NO: 13396 - protein, 25 aa, Artificial Sequence
  Description of Artificial Sequence: Synthetic peptide
IPKEEVKPFITESKPSVEQRKQDDK

SEQ ID NO: 13397 - protein, 25 aa, Artificial Sequence
  Description of Artificial Sequence: Synthetic peptide
IAEIPKEEVKPFITESKPSVEQRKQ

SEQ ID NO: 13398 - protein, 25 aa, Artificial Sequence
  Description of Artificial Sequence: Synthetic peptide
EEVKPFITESKPSVEQRKQDDKKIK

SEQ ID NO: 13399 - protein, 25 aa, Artificial Sequence
  Description of Artificial Sequence: Synthetic peptide
LRANNTKGSLPINVIVFDGKSKCEE

SEQ ID NO: 13400 - protein, 25 aa, Artificial Sequence
  Description of Artificial Sequence: Synthetic peptide
RANNTKGSLPINVIVFDGKSKCEES

SEQ ID NO: 13401 - protein, 25 aa, Artificial Sequence
  Description of Artificial Sequence: Synthetic peptide
VVLSFELLHAPATVCGPKKSTNLVK

SEQ ID NO: 13402 - protein, 25 aa, Artificial Sequence
  Description of Artificial Sequence: Synthetic peptide
QNAVVKIYCPACHNSEVGPEHSLAE

SEQ ID NO: 13403 - protein, 25 aa, Artificial Sequence
  Description of Artificial Sequence: Synthetic peptide
YLPQNAVVKIYCPACHNSEVGPEHS

SEQ ID NO: 13404 - protein, 25 aa, Artificial Sequence
  Description of Artificial Sequence: Synthetic peptide
PQNAVVKIYCPACHNSEVGPEHSLA

SEQ ID NO: 13405 - protein, 25 aa, Artificial Sequence
  Description of Artificial Sequence: Synthetic peptide
LPQNAVVKIYCPACHNSEVGPEHSL

SEQ ID NO: 13406 - protein, 25 aa, Artificial Sequence
  Description of Artificial Sequence: Synthetic peptide
ESKPSVEQRKQDDKKIKACVEEVTT

SEQ ID NO: 13407 - protein, 25 aa, Artificial Sequence
  Description of Artificial Sequence: Synthetic peptide
TESKPSVEQRKQDDKKIKACVEEVT

SEQ ID NO: 13408 - protein, 25 aa, Artificial Sequence
  Description of Artificial Sequence: Synthetic peptide
RRSFYVYANGGKGFCKLHNWNCVNC

SEQ ID NO: 13409 - protein, 25 aa, Artificial Sequence
  Description of Artificial Sequence: Synthetic peptide
ITGRLQSLQTYVTQQLIRAAEIRAS

SEQ ID NO: 13410 - protein, 25 aa, Artificial Sequence
  Description of Artificial Sequence: Synthetic peptide
GDEVRQIAPGQTGKIADYNYKLPDD

SEQ ID NO: 13411 - protein, 25 aa, Artificial Sequence
  Description of Artificial Sequence: Synthetic peptide
DEVRQIAPGQTGKIADYNYKLPDDF

SEQ ID NO: 13412 - protein, 25 aa, Artificial Sequence
  Description of Artificial Sequence: Synthetic peptide
CVSFCYMHHMELPTGVHAGTDLEGN

SEQ ID NO: 13413 - protein, 25 aa, Artificial Sequence
  Description of Artificial Sequence: Synthetic peptide
VGLMWLSYFIASFRLFARTRSMWSF

SEQ ID NO: 13414 - protein, 25 aa, Artificial Sequence
  Description of Artificial Sequence: Synthetic peptide
LVGLMWLSYFIASFRLFARTRSMWS

SEQ ID NO: 13415 - protein, 25 aa, Artificial Sequence
  Description of Artificial Sequence: Synthetic peptide
LVIGAVILRGHLRIAGHHLGRCDIK

SEQ ID NO: 13416 - protein, 25 aa, Artificial Sequence
  Description of Artificial Sequence: Synthetic peptide
ELVIGAVILRGHLRIAGHHLGRCDI

SEQ ID NO: 13417 - protein, 25 aa, Artificial Sequence
  Description of Artificial Sequence: Synthetic peptide
VIGAVILRGHLRIAGHHLGRCDIKD

SEQ ID NO: 13418 - protein, 25 aa, Artificial Sequence
  Description of Artificial Sequence: Synthetic peptide
IGAVILRGHLRIAGHHLGRCDIKDL

SEQ ID NO: 13419 - protein, 25 aa, Artificial Sequence
  Description of Artificial Sequence: Synthetic peptide
CPACHNSEVGPEHSLAEYHNESGLK

SEQ ID NO: 13420 - protein, 25 aa, Artificial Sequence
  Description of Artificial Sequence: Synthetic peptide
YCPACHNSEVGPEHSLAEYHNESGL

SEQ ID NO: 13421 - protein, 25 aa, Artificial Sequence
  Description of Artificial Sequence: Synthetic peptide
AVVKIYCPACHNSEVGPEHSLAEYH

SEQ ID NO: 13422 - protein, 25 aa, Artificial Sequence
  Description of Artificial Sequence: Synthetic peptide
IYCPACHNSEVGPEHSLAEYHNESG

SEQ ID NO: 13423 - protein, 25 aa, Artificial Sequence
  Description of Artificial Sequence: Synthetic peptide
VVKIYCPACHNSEVGPEHSLAEYHN

SEQ ID NO: 13424 - protein, 25 aa, Artificial Sequence
  Description of Artificial Sequence: Synthetic peptide
VKIYCPACHNSEVGPEHSLAEYHNE

SEQ ID NO: 13425 - protein, 25 aa, Artificial Sequence
  Description of Artificial Sequence: Synthetic peptide
KIYCPACHNSEVGPEHSLAEYHNES

SEQ ID NO: 13426 - protein, 25 aa, Artificial Sequence
  Description of Artificial Sequence: Synthetic peptide
EAEVQIDRLITGRLQSLQTYVTQQL

SEQ ID NO: 13427 - protein, 25 aa, Artificial Sequence
  Description of Artificial Sequence: Synthetic peptide
AEVQIDRLITGRLQSLQTYVTQQLI

SEQ ID NO: 13428 - protein, 25 aa, Artificial Sequence
  Description of Artificial Sequence: Synthetic peptide
VEAEVQIDRLITGRLQSLQTYVTQQ

SEQ ID NO: 13429 - protein, 25 aa, Artificial Sequence
  Description of Artificial Sequence: Synthetic peptide
KDLLARAGKASCTLSEQLDFIDTKR

SEQ ID NO: 13430 - protein, 25 aa, Artificial Sequence
  Description of Artificial Sequence: Synthetic peptide
TTTIQTIVEVQPQLEMELTPVVQTI

SEQ ID NO: 13431 - protein, 25 aa, Artificial Sequence
  Description of Artificial Sequence: Synthetic peptide
EDNQTTTIQTIVEVQPQLEMELTPV

SEQ ID NO: 13432 - protein, 25 aa, Artificial Sequence
  Description of Artificial Sequence: Synthetic peptide
DNQTTTIQTIVEVQPQLEMELTPVV

SEQ ID NO: 13433 - protein, 25 aa, Artificial Sequence
  Description of Artificial Sequence: Synthetic peptide
DLLARAGKASCTLSEQLDFIDTKRG

SEQ ID NO: 13434 - protein, 25 aa, Artificial Sequence
  Description of Artificial Sequence: Synthetic peptide
SEARQHLKDGTCGLVEVEKGVLPQL

SEQ ID NO: 13435 - protein, 25 aa, Artificial Sequence
  Description of Artificial Sequence: Synthetic peptide
QTTTIQTIVEVQPQLEMELTPVVQT

SEQ ID NO: 13436 - protein, 25 aa, Artificial Sequence
  Description of Artificial Sequence: Synthetic peptide
LLARAGKASCTLSEQLDFIDTKRGV

SEQ ID NO: 13437 - protein, 25 aa, Artificial Sequence
  Description of Artificial Sequence: Synthetic peptide
NQTTTIQTIVEVQPQLEMELTPVVQ

SEQ ID NO: 13438 - protein, 25 aa, Artificial Sequence
  Description of Artificial Sequence: Synthetic peptide
TSDYYQLYSTQLSTDTGVEHVTFFI

SEQ ID NO: 13439 - protein, 25 aa, Artificial Sequence
  Description of Artificial Sequence: Synthetic peptide
KKVDGVVQQLPETYFTQSRNLQEFK

SEQ ID NO: 13440 - protein, 25 aa, Artificial Sequence
  Description of Artificial Sequence: Synthetic peptide
KVDGVVQQLPETYFTQSRNLQEFKP

SEQ ID NO: 13441 - protein, 25 aa, Artificial Sequence
  Description of Artificial Sequence: Synthetic peptide
ADIVVFDEISMATNYDLSVVNARLR

SEQ ID NO: 13442 - protein, 25 aa, Artificial Sequence
  Description of Artificial Sequence: Synthetic peptide
DSLSSTASALGKLQDVVNQNAQALN

SEQ ID NO: 13443 - protein, 25 aa, Artificial Sequence
  Description of Artificial Sequence: Synthetic peptide
QDSLSSTASALGKLQDVVNQNAQAL

SEQ ID NO: 13444 - protein, 25 aa, Artificial Sequence
  Description of Artificial Sequence: Synthetic peptide
TGVLTESNKKFLPFQQFGRDIADTT

SEQ ID NO: 13445 - protein, 25 aa, Artificial Sequence
  Description of Artificial Sequence: Synthetic peptide
LTESNKKFLPFQQFGRDIADTTDAV

SEQ ID NO: 13446 - protein, 25 aa, Artificial Sequence
  Description of Artificial Sequence: Synthetic peptide
TESNKKFLPFQQFGRDIADTTDAVR

SEQ ID NO: 13447 - protein, 25 aa, Artificial Sequence
  Description of Artificial Sequence: Synthetic peptide
VLTESNKKFLPFQQFGRDIADTTDA

SEQ ID NO: 13448 - protein, 25 aa, Artificial Sequence
  Description of Artificial Sequence: Synthetic peptide
ESNKKFLPFQQFGRDIADTTDAVRD

SEQ ID NO: 13449 - protein, 25 aa, Artificial Sequence
  Description of Artificial Sequence: Synthetic peptide
GVLTESNKKFLPFQQFGRDIADTTD

SEQ ID NO: 13450 - protein, 25 aa, Artificial Sequence
  Description of Artificial Sequence: Synthetic peptide
QITISSFKWDLTAFGLVAEWFLAYI

SEQ ID NO: 13451 - protein, 25 aa, Artificial Sequence
  Description of Artificial Sequence: Synthetic peptide
ETIQITISSFKWDLTAFGLVAEWFL

SEQ ID NO: 13452 - protein, 25 aa, Artificial Sequence
  Description of Artificial Sequence: Synthetic peptide
LETIQITISSFKWDLTAFGLVAEWF

SEQ ID NO: 13453 - protein, 25 aa, Artificial Sequence
  Description of Artificial Sequence: Synthetic peptide
IQITISSFKWDLTAFGLVAEWFLAY

SEQ ID NO: 13454 - protein, 25 aa, Artificial Sequence
  Description of Artificial Sequence: Synthetic peptide
SLETIQITISSFKWDLTAFGLVAEW

SEQ ID NO: 13455 - protein, 25 aa, Artificial Sequence
  Description of Artificial Sequence: Synthetic peptide
TIQITISSFKWDLTAFGLVAEWFLA

SEQ ID NO: 13456 - protein, 25 aa, Artificial Sequence
  Description of Artificial Sequence: Synthetic peptide
ALLLLDRLNQLESKMSGKGQQQQGQ

SEQ ID NO: 13457 - protein, 25 aa, Artificial Sequence
  Description of Artificial Sequence: Synthetic peptide
LALLLLDRLNQLESKMSGKGQQQQG

SEQ ID NO: 13458 - protein, 25 aa, Artificial Sequence
  Description of Artificial Sequence: Synthetic peptide
LGKLQDVVNQNAQALNTLVKQLSSN

SEQ ID NO: 13459 - protein, 25 aa, Artificial Sequence
  Description of Artificial Sequence: Synthetic peptide
PPALQDAYYRARAGEAANFCALILA

SEQ ID NO: 13460 - protein, 25 aa, Artificial Sequence
  Description of Artificial Sequence: Synthetic peptide
LKFNPPALQDAYYRARAGEAANFCA

SEQ ID NO: 13461 - protein, 25 aa, Artificial Sequence
  Description of Artificial Sequence: Synthetic peptide
NPPALQDAYYRARAGEAANFCALIL

SEQ ID NO: 13462 - protein, 25 aa, Artificial Sequence
  Description of Artificial Sequence: Synthetic peptide
FNPPALQDAYYRARAGEAANFCALI

SEQ ID NO: 13463 - protein, 25 aa, Artificial Sequence
  Description of Artificial Sequence: Synthetic peptide
KFNPPALQDAYYRARAGEAANFCAL

SEQ ID NO: 13464 - protein, 25 aa, Artificial Sequence
  Description of Artificial Sequence: Synthetic peptide
PALQDAYYRARAGEAANFCALILAY

SEQ ID NO: 13465 - protein, 25 aa, Artificial Sequence
  Description of Artificial Sequence: Synthetic peptide
DKNTQEVFAQVKQIYKTPPIKDFGG

SEQ ID NO: 13466 - protein, 25 aa, Artificial Sequence
  Description of Artificial Sequence: Synthetic peptide
VGMQKYSTLQGPPGTGKSHFAIGLA

SEQ ID NO: 13467 - protein, 25 aa, Artificial Sequence
  Description of Artificial Sequence: Synthetic peptide
GMQKYSTLQGPPGTGKSHFAIGLAL

SEQ ID NO: 13468 - protein, 25 aa, Artificial Sequence
  Description of Artificial Sequence: Synthetic peptide
AYYVGYLQPRTFLLKYNENGTITDA

SEQ ID NO: 13469 - protein, 25 aa, Artificial Sequence
  Description of Artificial Sequence: Synthetic peptide
DGQVDLFRNARNGVLITEGSVKGLQ

SEQ ID NO: 13470 - protein, 25 aa, Artificial Sequence
  Description of Artificial Sequence: Synthetic peptide
LMYKGLPWNVVRIKIVQMLSDTLKN

SEQ ID NO: 13471 - protein, 25 aa, Artificial Sequence
  Description of Artificial Sequence: Synthetic peptide
MYKGLPWNVVRIKIVQMLSDTLKNL

SEQ ID NO: 13472 - protein, 25 aa, Artificial Sequence
  Description of Artificial Sequence: Synthetic peptide
HYTPSFKKGAKLLHKPIVWHVNNAT

SEQ ID NO: 13473 - protein, 25 aa, Artificial Sequence
  Description of Artificial Sequence: Synthetic peptide
YKHYTPSFKKGAKLLHKPIVWHVNN

SEQ ID NO: 13474 - protein, 25 aa, Artificial Sequence
  Description of Artificial Sequence: Synthetic peptide
KHYTPSFKKGAKLLHKPIVWHVNNA

SEQ ID NO: 13475 - protein, 25 aa, Artificial Sequence
  Description of Artificial Sequence: Synthetic peptide
KVGGSCVLSGHNLAKHCLHVVGPNV

SEQ ID NO: 13476 - protein, 25 aa, Artificial Sequence
  Description of Artificial Sequence: Synthetic peptide
PLKVGGSCVLSGHNLAKHCLHVVGP

SEQ ID NO: 13477 - protein, 25 aa, Artificial Sequence
  Description of Artificial Sequence: Synthetic peptide
LKVGGSCVLSGHNLAKHCLHVVGPN

SEQ ID NO: 13478 - protein, 25 aa, Artificial Sequence
  Description of Artificial Sequence: Synthetic peptide
HPNQEYADVFHLYLQYIRKLHDELT

SEQ ID NO: 13479 - protein, 25 aa, Artificial Sequence
  Description of Artificial Sequence: Synthetic peptide
KHPNQEYADVFHLYLQYIRKLHDEL

SEQ ID NO: 13480 - protein, 25 aa, Artificial Sequence
  Description of Artificial Sequence: Synthetic peptide
HDELTGHMLDMYSVMLTNDNTSRYW

SEQ ID NO: 13481 - protein, 25 aa, Artificial Sequence
  Description of Artificial Sequence: Synthetic peptide
KYTMADLVYALRHFDEGNCDTLKEI

SEQ ID NO: 13482 - protein, 25 aa, Artificial Sequence
  Description of Artificial Sequence: Synthetic peptide
TKYTMADLVYALRHFDEGNCDTLKE

SEQ ID NO: 13483 - protein, 25 aa, Artificial Sequence
  Description of Artificial Sequence: Synthetic peptide
LTKYTMADLVYALRHFDEGNCDTLK

SEQ ID NO: 13484 - protein, 25 aa, Artificial Sequence
  Description of Artificial Sequence: Synthetic peptide
YTMADLVYALRHFDEGNCDTLKEIL

SEQ ID NO: 13485 - protein, 25 aa, Artificial Sequence
  Description of Artificial Sequence: Synthetic peptide
QRLTKYTMADLVYALRHFDEGNCDT

SEQ ID NO: 13486 - protein, 25 aa, Artificial Sequence
  Description of Artificial Sequence: Synthetic peptide
MADLVYALRHFDEGNCDTLKEILVT

SEQ ID NO: 13487 - protein, 25 aa, Artificial Sequence
  Description of Artificial Sequence: Synthetic peptide
TMADLVYALRHFDEGNCDTLKEILV

SEQ ID NO: 13488 - protein, 25 aa, Artificial Sequence
  Description of Artificial Sequence: Synthetic peptide
RLTKYTMADLVYALRHFDEGNCDTL

SEQ ID NO: 13489 - protein, 25 aa, Artificial Sequence
  Description of Artificial Sequence: Synthetic peptide
YHYQECVRGTTVLLKEPCSSGTYEG

SEQ ID NO: 13490 - protein, 25 aa, Artificial Sequence
  Description of Artificial Sequence: Synthetic peptide
YQECVRGTTVLLKEPCSSGTYEGNS

SEQ ID NO: 13491 - protein, 25 aa, Artificial Sequence
  Description of Artificial Sequence: Synthetic peptide
QECVRGTTVLLKEPCSSGTYEGNSP

SEQ ID NO: 13492 - protein, 25 aa, Artificial Sequence
  Description of Artificial Sequence: Synthetic peptide
HYQECVRGTTVLLKEPCSSGTYEGN

SEQ ID NO: 13493 - protein, 25 aa, Artificial Sequence
  Description of Artificial Sequence: Synthetic peptide
LYHYQECVRGTTVLLKEPCSSGTYE

SEQ ID NO: 13494 - protein, 25 aa, Artificial Sequence
  Description of Artificial Sequence: Synthetic peptide
VSGTNGTKRFDNPVLPFNDGVYFAS

SEQ ID NO: 13495 - protein, 25 aa, Artificial Sequence
  Description of Artificial Sequence: Synthetic peptide
IHVSGTNGTKRFDNPVLPFNDGVYF

SEQ ID NO: 13496 - protein, 25 aa, Artificial Sequence
  Description of Artificial Sequence: Synthetic peptide
AIHVSGTNGTKRFDNPVLPFNDGVY

SEQ ID NO: 13497 - protein, 25 aa, Artificial Sequence
  Description of Artificial Sequence: Synthetic peptide
GTNGTKRFDNPVLPFNDGVYFASTE

SEQ ID NO: 13498 - protein, 25 aa, Artificial Sequence
  Description of Artificial Sequence: Synthetic peptide
TNGTKRFDNPVLPFNDGVYFASTEK

SEQ ID NO: 13499 - protein, 25 aa, Artificial Sequence
  Description of Artificial Sequence: Synthetic peptide
HVSGTNGTKRFDNPVLPFNDGVYFA

SEQ ID NO: 13500 - protein, 25 aa, Artificial Sequence
  Description of Artificial Sequence: Synthetic peptide
SGTNGTKRFDNPVLPFNDGVYFAST

SEQ ID NO: 13501 - protein, 25 aa, Artificial Sequence
  Description of Artificial Sequence: Synthetic peptide
HNQDVNLHSSRLSFKELLVYAADPA

SEQ ID NO: 13502 - protein, 25 aa, Artificial Sequence
  Description of Artificial Sequence: Synthetic peptide
GTGVLTESNKKFLPFQQFGRDIADT

SEQ ID NO: 13503 - protein, 25 aa, Artificial Sequence
  Description of Artificial Sequence: Synthetic peptide
YSLLLCRMNSRNYIAQVDVVNFNLT

SEQ ID NO: 13504 - protein, 25 aa, Artificial Sequence
  Description of Artificial Sequence: Synthetic peptide
HNWNCVNCDTFCAGSTFISDEVARD

SEQ ID NO: 13505 - protein, 25 aa, Artificial Sequence
  Description of Artificial Sequence: Synthetic peptide
NCVNCDTFCAGSTFISDEVARDLSL

SEQ ID NO: 13506 - protein, 25 aa, Artificial Sequence
  Description of Artificial Sequence: Synthetic peptide
WNCVNCDTFCAGSTFISDEVARDLS

SEQ ID NO: 13507 - protein, 25 aa, Artificial Sequence
  Description of Artificial Sequence: Synthetic peptide
NWNCVNCDTFCAGSTFISDEVARDL

SEQ ID NO: 13508 - protein, 25 aa, Artificial Sequence
  Description of Artificial Sequence: Synthetic peptide
GYLTSSSKTPEEHFIETISLAGSYK

SEQ ID NO: 13509 - protein, 25 aa, Artificial Sequence
  Description of Artificial Sequence: Synthetic peptide
QTLLALHRSYLTPGDSSSGWTAGAA

SEQ ID NO: 13510 - protein, 25 aa, Artificial Sequence
  Description of Artificial Sequence: Synthetic peptide
VLQQLRVESSSKLWAQCVQLHNDIL

SEQ ID NO: 13511 - protein, 25 aa, Artificial Sequence
  Description of Artificial Sequence: Synthetic peptide
LQQLRVESSSKLWAQCVQLHNDILL

SEQ ID NO: 13512 - protein, 25 aa, Artificial Sequence
  Description of Artificial Sequence: Synthetic peptide
QQLRVESSSKLWAQCVQLHNDILLA

SEQ ID NO: 13513 - protein, 25 aa, Artificial Sequence
  Description of Artificial Sequence: Synthetic peptide
WLIVGVALLAVFQSASKIITLKKRW

SEQ ID NO: 13514 - protein, 25 aa, Artificial Sequence
  Description of Artificial Sequence: Synthetic peptide
LIVGVALLAVFQSASKIITLKKRWQ

SEQ ID NO: 13515 - protein, 25 aa, Artificial Sequence
  Description of Artificial Sequence: Synthetic peptide
IVGVALLAVFQSASKIITLKKRWQL

SEQ ID NO: 13516 - protein, 25 aa, Artificial Sequence
  Description of Artificial Sequence: Synthetic peptide
GDCEEEEFEPSTQYEYGTEDDYQGK

SEQ ID NO: 13517 - protein, 25 aa, Artificial Sequence
  Description of Artificial Sequence: Synthetic peptide
NGLTGTGVLTESNKKFLPFQQFGRD

SEQ ID NO: 13518 - protein, 25 aa, Artificial Sequence
  Description of Artificial Sequence: Synthetic peptide
FNGLTGTGVLTESNKKFLPFQQFGR

SEQ ID NO: 13519 - protein, 25 aa, Artificial Sequence
  Description of Artificial Sequence: Synthetic peptide
DIVVFDEISMATNYDLSVVNARLRA

SEQ ID NO: 13520 - protein, 25 aa, Artificial Sequence
  Description of Artificial Sequence: Synthetic peptide
HLYLQYIRKLHDELTGHMLDMYSVM

SEQ ID NO: 13521 - protein, 25 aa, Artificial Sequence
  Description of Artificial Sequence: Synthetic peptide
IQEGVVDYGARFYFYTSKTTVASLI

SEQ ID NO: 13522 - protein, 25 aa, Artificial Sequence
  Description of Artificial Sequence: Synthetic peptide
NRATRVECTTIVNGVRRSFYVYANG

SEQ ID NO: 13523 - protein, 25 aa, Artificial Sequence
  Description of Artificial Sequence: Synthetic peptide
IKQYGDCLGDIAARDLICAQKFNGL

SEQ ID NO: 13524 - protein, 25 aa, Artificial Sequence
  Description of Artificial Sequence: Synthetic peptide
FIKQYGDCLGDIAARDLICAQKFNG

SEQ ID NO: 13525 - protein, 25 aa, Artificial Sequence
  Description of Artificial Sequence: Synthetic peptide
FPREGVFVSNGTHWFVTQRNFYEPQ

SEQ ID NO: 13526 - protein, 25 aa, Artificial Sequence
  Description of Artificial Sequence: Synthetic peptide
REGVFVSNGTHWFVTQRNFYEPQII

SEQ ID NO: 13527 - protein, 25 aa, Artificial Sequence
  Description of Artificial Sequence: Synthetic peptide
PREGVFVSNGTHWFVTQRNFYEPQI

SEQ ID NO: 13528 - protein, 25 aa, Artificial Sequence
  Description of Artificial Sequence: Synthetic peptide
YKGIKIQEGVVDYGARFYFYTSKTT

SEQ ID NO: 13529 - protein, 25 aa, Artificial Sequence
  Description of Artificial Sequence: Synthetic peptide
KGIKIQEGVVDYGARFYFYTSKTTV

SEQ ID NO: 13530 - protein, 25 aa, Artificial Sequence
  Description of Artificial Sequence: Synthetic peptide
AGFIKQYGDCLGDIAARDLICAQKF

SEQ ID NO: 13531 - protein, 25 aa, Artificial Sequence
  Description of Artificial Sequence: Synthetic peptide
GFIKQYGDCLGDIAARDLICAQKFN

SEQ ID NO: 13532 - protein, 25 aa, Artificial Sequence
  Description of Artificial Sequence: Synthetic peptide
IEFLKRGDKSVYYTSNPTTFHLDGE

SEQ ID NO: 13533 - protein, 25 aa, Artificial Sequence
  Description of Artificial Sequence: Synthetic peptide
PKYKFVRIQPGQTFSVLACYNGSPS

SEQ ID NO: 13534 - protein, 25 aa, Artificial Sequence
  Description of Artificial Sequence: Synthetic peptide
VKMLCTHTGTGQAITVTPEANMDQE

SEQ ID NO: 13535 - protein, 25 aa, Artificial Sequence
  Description of Artificial Sequence: Synthetic peptide
CVKMLCTHTGTGQAITVTPEANMDQ

SEQ ID NO: 13536 - protein, 25 aa, Artificial Sequence
  Description of Artificial Sequence: Synthetic peptide
NVANYQKVGMQKYSTLQGPPGTGKS

SEQ ID NO: 13537 - protein, 25 aa, Artificial Sequence
  Description of Artificial Sequence: Synthetic peptide
GTAVMSLKEGQINDMILSLLSKGRL

SEQ ID NO: 13538 - protein, 25 aa, Artificial Sequence
  Description of Artificial Sequence: Synthetic peptide
DKSAFVNLKQLPFFYYSDSPCESHG

SEQ ID NO: 13539 - protein, 25 aa, Artificial Sequence
  Description of Artificial Sequence: Synthetic peptide
NKKDWYDFVENPDILRVYANLGERV

SEQ ID NO: 13540 - protein, 25 aa, Artificial Sequence
  Description of Artificial Sequence: Synthetic peptide
TLVATAEAELAKNVSLDNVLSTFIS

SEQ ID NO: 13541 - protein, 25 aa, Artificial Sequence
  Description of Artificial Sequence: Synthetic peptide
GGDGKMKDLSPRWYFYYLGTGPEAG

SEQ ID NO: 13542 - protein, 25 aa, Artificial Sequence
  Description of Artificial Sequence: Synthetic peptide
MVSLLSVLLSMQGAVDINKLCEEML

SEQ ID NO: 13543 - protein, 25 aa, Artificial Sequence
  Description of Artificial Sequence: Synthetic peptide
EKMVSLLSVLLSMQGAVDINKLCEE

SEQ ID NO: 13544 - protein, 25 aa, Artificial Sequence
  Description of Artificial Sequence: Synthetic peptide
KMVSLLSVLLSMQGAVDINKLCEEM

SEQ ID NO: 13545 - protein, 25 aa, Artificial Sequence
  Description of Artificial Sequence: Synthetic peptide
IIGGAKLKALNLGETFVTHSKGLYR

SEQ ID NO: 13546 - protein, 25 aa, Artificial Sequence
  Description of Artificial Sequence: Synthetic peptide
IIIGGAKLKALNLGETFVTHSKGLY

SEQ ID NO: 13547 - protein, 25 aa, Artificial Sequence
  Description of Artificial Sequence: Synthetic peptide
SYLFQHANLDSCKRVLNVVCKTCGQ

SEQ ID NO: 13548 - protein, 25 aa, Artificial Sequence
  Description of Artificial Sequence: Synthetic peptide
MSYLFQHANLDSCKRVLNVVCKTCG

SEQ ID NO: 13549 - protein, 25 aa, Artificial Sequence
  Description of Artificial Sequence: Synthetic peptide
KSPNFSKLINIIIWFLLLSVCLGSL

SEQ ID NO: 13550 - protein, 25 aa, Artificial Sequence
  Description of Artificial Sequence: Synthetic peptide
LKSPNFSKLINIIIWFLLLSVCLGS

SEQ ID NO: 13551 - protein, 25 aa, Artificial Sequence
  Description of Artificial Sequence: Synthetic peptide
PVCVETKAIVSTIQRKYKGIKIQEG

SEQ ID NO: 13552 - protein, 25 aa, Artificial Sequence
  Description of Artificial Sequence: Synthetic peptide
VCVETKAIVSTIQRKYKGIKIQEGV

SEQ ID NO: 13553 - protein, 25 aa, Artificial Sequence
  Description of Artificial Sequence: Synthetic peptide
CVETKAIVSTIQRKYKGIKIQEGVV

SEQ ID NO: 13554 - protein, 25 aa, Artificial Sequence
  Description of Artificial Sequence: Synthetic peptide
MPVCVETKAIVSTIQRKYKGIKIQE

SEQ ID NO: 13555 - protein, 25 aa, Artificial Sequence
  Description of Artificial Sequence: Synthetic peptide
KEMYLKLRSDVLLPLTQYNRYLALY

SEQ ID NO: 13556 - protein, 25 aa, Artificial Sequence
  Description of Artificial Sequence: Synthetic peptide
DKAGQKTYERHSLSHFVNLDNLRAN

SEQ ID NO: 13557 - protein, 25 aa, Artificial Sequence
  Description of Artificial Sequence: Synthetic peptide
DTTSYREAACCHLAKALNDFSNSGS

SEQ ID NO: 13558 - protein, 25 aa, Artificial Sequence
  Description of Artificial Sequence: Synthetic peptide
SYREAACCHLAKALNDFSNSGSDVL

SEQ ID NO: 13559 - protein, 25 aa, Artificial Sequence
  Description of Artificial Sequence: Synthetic peptide
TTSYREAACCHLAKALNDFSNSGSD

SEQ ID NO: 13560 - protein, 25 aa, Artificial Sequence
  Description of Artificial Sequence: Synthetic peptide
YREAACCHLAKALNDFSNSGSDVLY

SEQ ID NO: 13561 - protein, 25 aa, Artificial Sequence
  Description of Artificial Sequence: Synthetic peptide
AGALNKATNNAMQVESDDYIATNGP

SEQ ID NO: 13562 - protein, 25 aa, Artificial Sequence
  Description of Artificial Sequence: Synthetic peptide
REAACCHLAKALNDFSNSGSDVLYQ

SEQ ID NO: 13563 - protein, 25 aa, Artificial Sequence
  Description of Artificial Sequence: Synthetic peptide
AACCHLAKALNDFSNSGSDVLYQPP

SEQ ID NO: 13564 - protein, 25 aa, Artificial Sequence
  Description of Artificial Sequence: Synthetic peptide
TSYREAACCHLAKALNDFSNSGSDV

SEQ ID NO: 13565 - protein, 25 aa, Artificial Sequence
  Description of Artificial Sequence: Synthetic peptide
EAACCHLAKALNDFSNSGSDVLYQP

SEQ ID NO: 13566 - protein, 25 aa, Artificial Sequence
  Description of Artificial Sequence: Synthetic peptide
SNLLLQYGSFCTQLNRALTGIAVEQ

SEQ ID NO: 13567 - protein, 25 aa, Artificial Sequence
  Description of Artificial Sequence: Synthetic peptide
NLLLQYGSFCTQLNRALTGIAVEQD

SEQ ID NO: 13568 - protein, 25 aa, Artificial Sequence
  Description of Artificial Sequence: Synthetic peptide
DVLVRGFGDSVEEVLSEARQHLKDG

SEQ ID NO: 13569 - protein, 25 aa, Artificial Sequence
  Description of Artificial Sequence: Synthetic peptide
VLVRGFGDSVEEVLSEARQHLKDGT

SEQ ID NO: 13570 - protein, 25 aa, Artificial Sequence
  Description of Artificial Sequence: Synthetic peptide
WVPRASANIGCNHTGVVGEGSEGLN

SEQ ID NO: 13571 - protein, 25 aa, Artificial Sequence
  Description of Artificial Sequence: Synthetic peptide
YWVPRASANIGCNHTGVVGEGSEGL

SEQ ID NO: 13572 - protein, 25 aa, Artificial Sequence
  Description of Artificial Sequence: Synthetic peptide
AYWVPRASANIGCNHTGVVGEGSEG

SEQ ID NO: 13573 - protein, 25 aa, Artificial Sequence
  Description of Artificial Sequence: Synthetic peptide
VPRASANIGCNHTGVVGEGSEGLND

SEQ ID NO: 13574 - protein, 25 aa, Artificial Sequence
  Description of Artificial Sequence: Synthetic peptide
ETLPTEVLTEEVVLKTGDLQPLEQP

SEQ ID NO: 13575 - protein, 25 aa, Artificial Sequence
  Description of Artificial Sequence: Synthetic peptide
ARSEDKRAKVTSAMQTMLFTMLRKL

SEQ ID NO: 13576 - protein, 25 aa, Artificial Sequence
  Description of Artificial Sequence: Synthetic peptide
KQARSEDKRAKVTSAMQTMLFTMLR

SEQ ID NO: 13577 - protein, 25 aa, Artificial Sequence
  Description of Artificial Sequence: Synthetic peptide
GETLPTEVLTEEVVLKTGDLQPLEQ

SEQ ID NO: 13578 - protein, 25 aa, Artificial Sequence
  Description of Artificial Sequence: Synthetic peptide
NSGSDVLYQPPQTSITSAVLQSGFR

SEQ ID NO: 13579 - protein, 25 aa, Artificial Sequence
  Description of Artificial Sequence: Synthetic peptide
QARSEDKRAKVTSAMQTMLFTMLRK

SEQ ID NO: 13580 - protein, 25 aa, Artificial Sequence
  Description of Artificial Sequence: Synthetic peptide
RSEDKRAKVTSAMQTMLFTMLRKLD

SEQ ID NO: 13581 - protein, 25 aa, Artificial Sequence
  Description of Artificial Sequence: Synthetic peptide
TLPTEVLTEEVVLKTGDLQPLEQPT

SEQ ID NO: 13582 - protein, 25 aa, Artificial Sequence
  Description of Artificial Sequence: Synthetic peptide
NKCAYWVPRASANIGCNHTGVVGEG

SEQ ID NO: 13583 - protein, 25 aa, Artificial Sequence
  Description of Artificial Sequence: Synthetic peptide
HNKCAYWVPRASANIGCNHTGVVGE

SEQ ID NO: 13584 - protein, 25 aa, Artificial Sequence
  Description of Artificial Sequence: Synthetic peptide
KHCLHVVGPNVNKGEDIQLLKSAYE

SEQ ID NO: 13585 - protein, 25 aa, Artificial Sequence
  Description of Artificial Sequence: Synthetic peptide
GEFKLASHMYCSFYPPDEDEEEGDC

SEQ ID NO: 13586 - protein, 25 aa, Artificial Sequence
  Description of Artificial Sequence: Synthetic peptide
SGEFKLASHMYCSFYPPDEDEEEGD

SEQ ID NO: 13587 - protein, 25 aa, Artificial Sequence
  Description of Artificial Sequence: Synthetic peptide
SGHNLAKHCLHVVGPNVNKGEDIQL

SEQ ID NO: 13588 - protein, 25 aa, Artificial Sequence
  Description of Artificial Sequence: Synthetic peptide
HNLAKHCLHVVGPNVNKGEDIQLLK

SEQ ID NO: 13589 - protein, 25 aa, Artificial Sequence
  Description of Artificial Sequence: Synthetic peptide
GHNLAKHCLHVVGPNVNKGEDIQLL

SEQ ID NO: 13590 - protein, 25 aa, Artificial Sequence
  Description of Artificial Sequence: Synthetic peptide
IVKTDGTLMIERFVSLAIDAYPLTK

SEQ ID NO: 13591 - protein, 25 aa, Artificial Sequence
  Description of Artificial Sequence: Synthetic peptide
VKTDGTLMIERFVSLAIDAYPLTKH

SEQ ID NO: 13592 - protein, 25 aa, Artificial Sequence
  Description of Artificial Sequence: Synthetic peptide
DIVKTDGTLMIERFVSLAIDAYPLT

SEQ ID NO: 13593 - protein, 25 aa, Artificial Sequence
  Description of Artificial Sequence: Synthetic peptide
NSPFHPLADNKFALTCFSTQFAFAC

SEQ ID NO: 13594 - protein, 25 aa, Artificial Sequence
  Description of Artificial Sequence: Synthetic peptide
YSSANNCTFEYVSQPFLMDLEGKQG

SEQ ID NO: 13595 - protein, 25 aa, Artificial Sequence
  Description of Artificial Sequence: Synthetic peptide
VYSSANNCTFEYVSQPFLMDLEGKQ

SEQ ID NO: 13596 - protein, 25 aa, Artificial Sequence
  Description of Artificial Sequence: Synthetic peptide
HSIGFDYVYNPFMIDVQQWGFTGNL

SEQ ID NO: 13597 - protein, 25 aa, Artificial Sequence
  Description of Artificial Sequence: Synthetic peptide
SGDATTAYANSVFNICQAVTANVNA

SEQ ID NO: 13598 - protein, 25 aa, Artificial Sequence
  Description of Artificial Sequence: Synthetic peptide
SSGDATTAYANSVFNICQAVTANVN

SEQ ID NO: 13599 - protein, 25 aa, Artificial Sequence
  Description of Artificial Sequence: Synthetic peptide
TVDSSQGSEYDYVIFTQTTETAHSC

SEQ ID NO: 13600 - protein, 25 aa, Artificial Sequence
  Description of Artificial Sequence: Synthetic peptide
PFHPLADNKFALTCFSTQFAFACPD

SEQ ID NO: 13601 - protein, 25 aa, Artificial Sequence
  Description of Artificial Sequence: Synthetic peptide
HPLADNKFALTCFSTQFAFACPDGV

SEQ ID NO: 13602 - protein, 25 aa, Artificial Sequence
  Description of Artificial Sequence: Synthetic peptide
LYRNRDVDTDFVNEFYAYLRKHFSM

SEQ ID NO: 13603 - protein, 25 aa, Artificial Sequence
  Description of Artificial Sequence: Synthetic peptide
CLYRNRDVDTDFVNEFYAYLRKHFS

SEQ ID NO: 13604 - protein, 25 aa, Artificial Sequence
  Description of Artificial Sequence: Synthetic peptide
GWHNMLKTVYSDVENPHLMGWDYPK

SEQ ID NO: 13605 - protein, 25 aa, Artificial Sequence
  Description of Artificial Sequence: Synthetic peptide
HNMLKTVYSDVENPHLMGWDYPKCD

SEQ ID NO: 13606 - protein, 25 aa, Artificial Sequence
  Description of Artificial Sequence: Synthetic peptide
WHNMLKTVYSDVENPHLMGWDYPKC

SEQ ID NO: 13607 - protein, 25 aa, Artificial Sequence
  Description of Artificial Sequence: Synthetic peptide
ADNKFALTCFSTQFAFACPDGVKHV

SEQ ID NO: 13608 - protein, 25 aa, Artificial Sequence
  Description of Artificial Sequence: Synthetic peptide
LADNKFALTCFSTQFAFACPDGVKH

SEQ ID NO: 13609 - protein, 25 aa, Artificial Sequence
  Description of Artificial Sequence: Synthetic peptide
DNKFALTCFSTQFAFACPDGVKHVY

SEQ ID NO: 13610 - protein, 25 aa, Artificial Sequence
  Description of Artificial Sequence: Synthetic peptide
PNCVNCLDDRCILHCANFNVLFSTV

SEQ ID NO: 13611 - protein, 25 aa, Artificial Sequence
  Description of Artificial Sequence: Synthetic peptide
IAARDLICAQKFNGLTVLPPLLTDE

SEQ ID NO: 13612 - protein, 25 aa, Artificial Sequence
  Description of Artificial Sequence: Synthetic peptide
DCVVLHSYFTSDYYQLYSTQLSTDT

SEQ ID NO: 13613 - protein, 25 aa, Artificial Sequence
  Description of Artificial Sequence: Synthetic peptide
KDCVVLHSYFTSDYYQLYSTQLSTD

SEQ ID NO: 13614 - protein, 25 aa, Artificial Sequence
  Description of Artificial Sequence: Synthetic peptide
AVDALCEKALKYLPIDKCSRIIPAR

SEQ ID NO: 13615 - protein, 25 aa, Artificial Sequence
  Description of Artificial Sequence: Synthetic peptide
PPTSFGPLVRKIFVDGVPFVVSTGY

SEQ ID NO: 13616 - protein, 25 aa, Artificial Sequence
  Description of Artificial Sequence: Synthetic peptide
ACSHAAVDALCEKALKYLPIDKCSR

SEQ ID NO: 13617 - protein, 25 aa, Artificial Sequence
  Description of Artificial Sequence: Synthetic peptide
HAAVDALCEKALKYLPIDKCSRIIP

SEQ ID NO: 13618 - protein, 25 aa, Artificial Sequence
  Description of Artificial Sequence: Synthetic peptide
SHAAVDALCEKALKYLPIDKCSRII

SEQ ID NO: 13619 - protein, 25 aa, Artificial Sequence
  Description of Artificial Sequence: Synthetic peptide
CSHAAVDALCEKALKYLPIDKCSRI

SEQ ID NO: 13620 - protein, 25 aa, Artificial Sequence
  Description of Artificial Sequence: Synthetic peptide
AAVDALCEKALKYLPIDKCSRIIPA

SEQ ID NO: 13621 - protein, 25 aa, Artificial Sequence
  Description of Artificial Sequence: Synthetic peptide
YTACSHAAVDALCEKALKYLPIDKC

SEQ ID NO: 13622 - protein, 25 aa, Artificial Sequence
  Description of Artificial Sequence: Synthetic peptide
VYTACSHAAVDALCEKALKYLPIDK

SEQ ID NO: 13623 - protein, 25 aa, Artificial Sequence
  Description of Artificial Sequence: Synthetic peptide
QGSEYDYVIFTQTTETAHSCNVNRF

SEQ ID NO: 13624 - protein, 25 aa, Artificial Sequence
  Description of Artificial Sequence: Synthetic peptide
GSEYDYVIFTQTTETAHSCNVNRFN

SEQ ID NO: 13625 - protein, 25 aa, Artificial Sequence
  Description of Artificial Sequence: Synthetic peptide
SQGSEYDYVIFTQTTETAHSCNVNR

SEQ ID NO: 13626 - protein, 25 aa, Artificial Sequence
  Description of Artificial Sequence: Synthetic peptide
KSNLKPFERDISTEIYQAGSTPCNG

SEQ ID NO: 13627 - protein, 25 aa, Artificial Sequence
  Description of Artificial Sequence: Synthetic peptide
TLKATEETFKLSYGIATVREVLSDR

SEQ ID NO: 13628 - protein, 25 aa, Artificial Sequence
  Description of Artificial Sequence: Synthetic peptide
ATEETFKLSYGIATVREVLSDRELH

SEQ ID NO: 13629 - protein, 25 aa, Artificial Sequence
  Description of Artificial Sequence: Synthetic peptide
KATEETFKLSYGIATVREVLSDREL

SEQ ID NO: 13630 - protein, 25 aa, Artificial Sequence
  Description of Artificial Sequence: Synthetic peptide
LKATEETFKLSYGIATVREVLSDRE

SEQ ID NO: 13631 - protein, 25 aa, Artificial Sequence
  Description of Artificial Sequence: Synthetic peptide
EETGTLIVNSVLLFLAFVVFLLVTL

SEQ ID NO: 13632 - protein, 25 aa, Artificial Sequence
  Description of Artificial Sequence: Synthetic peptide
LNTLVKQLSSNFGAISSVLNDILSR

SEQ ID NO: 13633 - protein, 25 aa, Artificial Sequence
  Description of Artificial Sequence: Synthetic peptide
ALNTLVKQLSSNFGAISSVLNDILS

SEQ ID NO: 13634 - protein, 25 aa, Artificial Sequence
  Description of Artificial Sequence: Synthetic peptide
FSQILPDPSKPSKRSFIEDLLFNKV

SEQ ID NO: 13635 - protein, 25 aa, Artificial Sequence
  Description of Artificial Sequence: Synthetic peptide
NFSQILPDPSKPSKRSFIEDLLFNK

SEQ ID NO: 13636 - protein, 25 aa, Artificial Sequence
  Description of Artificial Sequence: Synthetic peptide
SQILPDPSKPSKRSFIEDLLFNKVT

SEQ ID NO: 13637 - protein, 25 aa, Artificial Sequence
  Description of Artificial Sequence: Synthetic peptide
QLSSNFGAISSVLNDILSRLDKVEA

SEQ ID NO: 13638 - protein, 25 aa, Artificial Sequence
  Description of Artificial Sequence: Synthetic peptide
LVKQLSSNFGAISSVLNDILSRLDK

SEQ ID NO: 13639 - protein, 25 aa, Artificial Sequence
  Description of Artificial Sequence: Synthetic peptide
KQLSSNFGAISSVLNDILSRLDKVE

SEQ ID NO: 13640 - protein, 25 aa, Artificial Sequence
  Description of Artificial Sequence: Synthetic peptide
VKQLSSNFGAISSVLNDILSRLDKV

SEQ ID NO: 13641 - protein, 25 aa, Artificial Sequence
  Description of Artificial Sequence: Synthetic peptide
GPHEFCSQHTMLVKQGDDYVYLPYP

SEQ ID NO: 13642 - protein, 25 aa, Artificial Sequence
  Description of Artificial Sequence: Synthetic peptide
KGPHEFCSQHTMLVKQGDDYVYLPY

SEQ ID NO: 13643 - protein, 25 aa, Artificial Sequence
  Description of Artificial Sequence: Synthetic peptide
SAQCFKMFYKGVITHDVSSAINRPQ

SEQ ID NO: 13644 - protein, 25 aa, Artificial Sequence
  Description of Artificial Sequence: Synthetic peptide
QNAVASKILGLPTQTVDSSQGSEYD

SEQ ID NO: 13645 - protein, 25 aa, Artificial Sequence
  Description of Artificial Sequence: Synthetic peptide
NEVAKNLNESLIDLQELGKYEQYIK

SEQ ID NO: 13646 - protein, 25 aa, Artificial Sequence
  Description of Artificial Sequence: Synthetic peptide
RLNEVAKNLNESLIDLQELGKYEQY

SEQ ID NO: 13647 - protein, 25 aa, Artificial Sequence
  Description of Artificial Sequence: Synthetic peptide
LNEVAKNLNESLIDLQELGKYEQYI

SEQ ID NO: 13648 - protein, 25 aa, Artificial Sequence
  Description of Artificial Sequence: Synthetic peptide
AKNLNESLIDLQELGKYEQYIKWPW

SEQ ID NO: 13649 - protein, 25 aa, Artificial Sequence
  Description of Artificial Sequence: Synthetic peptide
KNLNESLIDLQELGKYEQYIKWPWY

SEQ ID NO: 13650 - protein, 25 aa, Artificial Sequence
  Description of Artificial Sequence: Synthetic peptide
VAKNLNESLIDLQELGKYEQYIKWP

SEQ ID NO: 13651 - protein, 25 aa, Artificial Sequence
  Description of Artificial Sequence: Synthetic peptide
EVAKNLNESLIDLQELGKYEQYIKW

SEQ ID NO: 13652 - protein, 25 aa, Artificial Sequence
  Description of Artificial Sequence: Synthetic peptide
KMFYKGVITHDVSSAINRPQIGVVR

SEQ ID NO: 13653 - protein, 25 aa, Artificial Sequence
  Description of Artificial Sequence: Synthetic peptide
FYKGVITHDVSSAINRPQIGVVREF

SEQ ID NO: 13654 - protein, 25 aa, Artificial Sequence
  Description of Artificial Sequence: Synthetic peptide
FKMFYKGVITHDVSSAINRPQIGVV

SEQ ID NO: 13655 - protein, 25 aa, Artificial Sequence
  Description of Artificial Sequence: Synthetic peptide
CFKMFYKGVITHDVSSAINRPQIGV

SEQ ID NO: 13656 - protein, 25 aa, Artificial Sequence
  Description of Artificial Sequence: Synthetic peptide
QCFKMFYKGVITHDVSSAINRPQIG

SEQ ID NO: 13657 - protein, 25 aa, Artificial Sequence
  Description of Artificial Sequence: Synthetic peptide
MFYKGVITHDVSSAINRPQIGVVRE

SEQ ID NO: 13658 - protein, 25 aa, Artificial Sequence
  Description of Artificial Sequence: Synthetic peptide
DRLNEVAKNLNESLIDLQELGKYEQ

SEQ ID NO: 13659 - protein, 25 aa, Artificial Sequence
  Description of Artificial Sequence: Synthetic peptide
PARMAGNGGDAALALLLLDRLNQLE

SEQ ID NO: 13660 - protein, 25 aa, Artificial Sequence
  Description of Artificial Sequence: Synthetic peptide
TPSDFVRATATIPIQASLPFGWLIV

SEQ ID NO: 13661 - protein, 25 aa, Artificial Sequence
  Description of Artificial Sequence: Synthetic peptide
CTFEYVSQPFLMDLEGKQGNFKNLR

SEQ ID NO: 13662 - protein, 25 aa, Artificial Sequence
  Description of Artificial Sequence: Synthetic peptide
ANQVIVNNLDKSAGFPFNKWGKARL

SEQ ID NO: 13663 - protein, 25 aa, Artificial Sequence
  Description of Artificial Sequence: Synthetic peptide
INANQVIVNNLDKSAGFPFNKWGKA

SEQ ID NO: 13664 - protein, 25 aa, Artificial Sequence
  Description of Artificial Sequence: Synthetic peptide
GCINANQVIVNNLDKSAGFPFNKWG

SEQ ID NO: 13665 - protein, 25 aa, Artificial Sequence
  Description of Artificial Sequence: Synthetic peptide
GGCINANQVIVNNLDKSAGFPFNKW

SEQ ID NO: 13666 - protein, 25 aa, Artificial Sequence
  Description of Artificial Sequence: Synthetic peptide
NANQVIVNNLDKSAGFPFNKWGKAR

SEQ ID NO: 13667 - protein, 25 aa, Artificial Sequence
  Description of Artificial Sequence: Synthetic peptide
CINANQVIVNNLDKSAGFPFNKWGK

SEQ ID NO: 13668 - protein, 25 aa, Artificial Sequence
  Description of Artificial Sequence: Synthetic peptide
PRRNVATLQAENVTGLFKDCSKVIT

SEQ ID NO: 13669 - protein, 25 aa, Artificial Sequence
  Description of Artificial Sequence: Synthetic peptide
WDYKRDAPAHISTIGVCSMTDIAKK

SEQ ID NO: 13670 - protein, 25 aa, Artificial Sequence
  Description of Artificial Sequence: Synthetic peptide
MEVTPSGTWLTYTGAIKLDDKDPNF

SEQ ID NO: 13671 - protein, 25 aa, Artificial Sequence
  Description of Artificial Sequence: Synthetic peptide
DMYSVMLTNDNTSRYWEPEFYEAMY

SEQ ID NO: 13672 - protein, 25 aa, Artificial Sequence
  Description of Artificial Sequence: Synthetic peptide
LDMYSVMLTNDNTSRYWEPEFYEAM

SEQ ID NO: 13673 - protein, 25 aa, Artificial Sequence
  Description of Artificial Sequence: Synthetic peptide
IGMEVTPSGTWLTYTGAIKLDDKDP

SEQ ID NO: 13674 - protein, 25 aa, Artificial Sequence
  Description of Artificial Sequence: Synthetic peptide
DKSAQCFKMFYKGVITHDVSSAINR

SEQ ID NO: 13675 - protein, 25 aa, Artificial Sequence
  Description of Artificial Sequence: Synthetic peptide
PETTADIVVFDEISMATNYDLSVVN

SEQ ID NO: 13676 - protein, 25 aa, Artificial Sequence
  Description of Artificial Sequence: Synthetic peptide
DVNLHSSRLSFKELLVYAADPAMHA

SEQ ID NO: 13677 - protein, 25 aa, Artificial Sequence
  Description of Artificial Sequence: Synthetic peptide
MPILTLTRALTAESHVDTDLTKPYI

SEQ ID NO: 13678 - protein, 25 aa, Artificial Sequence
  Description of Artificial Sequence: Synthetic peptide
VSQPFLMDLEGKQGNFKNLREFVFK

SEQ ID NO: 13679 - protein, 25 aa, Artificial Sequence
  Description of Artificial Sequence: Synthetic peptide
KRISNCVADYSVLYNSASFSTFKCY

SEQ ID NO: 13680 - protein, 25 aa, Artificial Sequence
  Description of Artificial Sequence: Synthetic peptide
RISNCVADYSVLYNSASFSTFKCYG

SEQ ID NO: 13681 - protein, 25 aa, Artificial Sequence
  Description of Artificial Sequence: Synthetic peptide
FIEDLLFNKVTLADAGFIKQYGDCL

SEQ ID NO: 13682 - protein, 25 aa, Artificial Sequence
  Description of Artificial Sequence: Synthetic peptide
QGEIKDATPSDFVRATATIPIQASL

SEQ ID NO: 13683 - protein, 25 aa, Artificial Sequence
  Description of Artificial Sequence: Synthetic peptide
TETAHSCNVNRFNVAITRAKVGILC

SEQ ID NO: 13684 - protein, 25 aa, Artificial Sequence
  Description of Artificial Sequence: Synthetic peptide
ECFDKFKVNSTLEQYVFCTVNALPE

SEQ ID NO: 13685 - protein, 25 aa, Artificial Sequence
  Description of Artificial Sequence: Synthetic peptide
QSLQTYVTQQLIRAAEIRASANLAA

SEQ ID NO: 13686 - protein, 25 aa, Artificial Sequence
  Description of Artificial Sequence: Synthetic peptide
LNRALTGIAVEQDKNTQEVFAQVKQ

SEQ ID NO: 13687 - protein, 25 aa, Artificial Sequence
  Description of Artificial Sequence: Synthetic peptide
QLNRALTGIAVEQDKNTQEVFAQVK

SEQ ID NO: 13688 - protein, 25 aa, Artificial Sequence
  Description of Artificial Sequence: Synthetic peptide
PVTLACFVLAAVYRINWITGGIAIA

SEQ ID NO: 13689 - protein, 25 aa, Artificial Sequence
  Description of Artificial Sequence: Synthetic peptide
FLWLLWPVTLACFVLAAVYRINWIT

SEQ ID NO: 13690 - protein, 25 aa, Artificial Sequence
  Description of Artificial Sequence: Synthetic peptide
EDLLFNKVTLADAGFIKQYGDCLGD

SEQ ID NO: 13691 - protein, 25 aa, Artificial Sequence
  Description of Artificial Sequence: Synthetic peptide
PRQKRTATKAYNVTQAFGRRGPEQT

SEQ ID NO: 13692 - protein, 25 aa, Artificial Sequence
  Description of Artificial Sequence: Synthetic peptide
KPRQKRTATKAYNVTQAFGRRGPEQ

SEQ ID NO: 13693 - protein, 25 aa, Artificial Sequence
  Description of Artificial Sequence: Synthetic peptide
AFDIYNDKVAGFAKFLKTNCCRFQE

SEQ ID NO: 13694 - protein, 25 aa, Artificial Sequence
  Description of Artificial Sequence: Synthetic peptide
PLSETKCTLKSFTVEKGIYQTSNFR

SEQ ID NO: 13695 - protein, 25 aa, Artificial Sequence
  Description of Artificial Sequence: Synthetic peptide
DPLSETKCTLKSFTVEKGIYQTSNF

SEQ ID NO: 13696 - protein, 25 aa, Artificial Sequence
  Description of Artificial Sequence: Synthetic peptide
LSETKCTLKSFTVEKGIYQTSNFRV

SEQ ID NO: 13697 - protein, 25 aa, Artificial Sequence
  Description of Artificial Sequence: Synthetic peptide
LDPLSETKCTLKSFTVEKGIYQTSN

SEQ ID NO: 13698 - protein, 25 aa, Artificial Sequence
  Description of Artificial Sequence: Synthetic peptide
FPNITNLCPFGEVFNATRFASVYAW

SEQ ID NO: 13699 - protein, 25 aa, Artificial Sequence
  Description of Artificial Sequence: Synthetic peptide
KNLREFVFKNIDGYFKIYSKHTPIN

SEQ ID NO: 13700 - protein, 25 aa, Artificial Sequence
  Description of Artificial Sequence: Synthetic peptide
NLREFVFKNIDGYFKIYSKHTPINL

SEQ ID NO: 13701 - protein, 25 aa, Artificial Sequence
  Description of Artificial Sequence: Synthetic peptide
FQFCNDPFLGVYYHKNNKSWMESEF

SEQ ID NO: 13702 - protein, 25 aa, Artificial Sequence
  Description of Artificial Sequence: Synthetic peptide
EFQFCNDPFLGVYYHKNNKSWMESE

SEQ ID NO: 13703 - protein, 25 aa, Artificial Sequence
  Description of Artificial Sequence: Synthetic peptide
PQADVEWKFYDAQPCSDKAYKIEEL

SEQ ID NO: 13704 - protein, 25 aa, Artificial Sequence
  Description of Artificial Sequence: Synthetic peptide
CTVNALPETTADIVVFDEISMATNY

SEQ ID NO: 13705 - protein, 25 aa, Artificial Sequence
  Description of Artificial Sequence: Synthetic peptide
TVNALPETTADIVVFDEISMATNYD

SEQ ID NO: 13706 - protein, 25 aa, Artificial Sequence
  Description of Artificial Sequence: Synthetic peptide
FCTVNALPETTADIVVFDEISMATN

SEQ ID NO: 13707 - protein, 25 aa, Artificial Sequence
  Description of Artificial Sequence: Synthetic peptide
GPEAGLPYGANKDGIIWVATEGALN

SEQ ID NO: 13708 - protein, 25 aa, Artificial Sequence
  Description of Artificial Sequence: Synthetic peptide
EAGLPYGANKDGIIWVATEGALNTP

SEQ ID NO: 13709 - protein, 25 aa, Artificial Sequence
  Description of Artificial Sequence: Synthetic peptide
PEAGLPYGANKDGIIWVATEGALNT

SEQ ID NO: 13710 - protein, 25 aa, Artificial Sequence
  Description of Artificial Sequence: Synthetic peptide
FLGTCRRCPAEIVDTVSALVYDNKL

SEQ ID NO: 13711 - protein, 25 aa, Artificial Sequence
  Description of Artificial Sequence: Synthetic peptide
MFLGTCRRCPAEIVDTVSALVYDNK

SEQ ID NO: 13712 - protein, 25 aa, Artificial Sequence
  Description of Artificial Sequence: Synthetic peptide
KIADKYVRNLQHRLYECLYRNRDVD

SEQ ID NO: 13713 - protein, 25 aa, Artificial Sequence
  Description of Artificial Sequence: Synthetic peptide
IADKYVRNLQHRLYECLYRNRDVDT

SEQ ID NO: 13714 - protein, 25 aa, Artificial Sequence
  Description of Artificial Sequence: Synthetic peptide
ETQALPQRQKKQQTVTLLPAADLDD

SEQ ID NO: 13715 - protein, 25 aa, Artificial Sequence
  Description of Artificial Sequence: Synthetic peptide
TQALPQRQKKQQTVTLLPAADLDDF

SEQ ID NO: 13716 - protein, 25 aa, Artificial Sequence
  Description of Artificial Sequence: Synthetic peptide
TKRFDNPVLPFNDGVYFASTEKSNI

SEQ ID NO: 13717 - protein, 25 aa, Artificial Sequence
  Description of Artificial Sequence: Synthetic peptide
KRFDNPVLPFNDGVYFASTEKSNII

SEQ ID NO: 13718 - protein, 25 aa, Artificial Sequence
  Description of Artificial Sequence: Synthetic peptide
NKDGIIWVATEGALNTPKDHIGTRN

SEQ ID NO: 13719 - protein, 25 aa, Artificial Sequence
  Description of Artificial Sequence: Synthetic peptide
KDGIIWVATEGALNTPKDHIGTRNP

SEQ ID NO: 13720 - protein, 25 aa, Artificial Sequence
  Description of Artificial Sequence: Synthetic peptide
FTTAPAICHDGKAHFPREGVFVSNG

SEQ ID NO: 13721 - protein, 25 aa, Artificial Sequence
  Description of Artificial Sequence: Synthetic peptide
TAPAICHDGKAHFPREGVFVSNGTH

SEQ ID NO: 13722 - protein, 25 aa, Artificial Sequence
  Description of Artificial Sequence: Synthetic peptide
NFTTAPAICHDGKAHFPREGVFVSN

SEQ ID NO: 13723 - protein, 25 aa, Artificial Sequence
  Description of Artificial Sequence: Synthetic peptide
KNFTTAPAICHDGKAHFPREGVFVS

SEQ ID NO: 13724 - protein, 25 aa, Artificial Sequence
  Description of Artificial Sequence: Synthetic peptide
TTAPAICHDGKAHFPREGVFVSNGT

SEQ ID NO: 13725 - protein, 25 aa, Artificial Sequence
  Description of Artificial Sequence: Synthetic peptide
EKNFTTAPAICHDGKAHFPREGVFV

SEQ ID NO: 13726 - protein, 25 aa, Artificial Sequence
  Description of Artificial Sequence: Synthetic peptide
SPRWYFYYLGTGPEAGLPYGANKDG

SEQ ID NO: 13727 - protein, 25 aa, Artificial Sequence
  Description of Artificial Sequence: Synthetic peptide
KRDAPAHISTIGVCSMTDIAKKPTE

SEQ ID NO: 13728 - protein, 25 aa, Artificial Sequence
  Description of Artificial Sequence: Synthetic peptide
RDAPAHISTIGVCSMTDIAKKPTET

SEQ ID NO: 13729 - protein, 25 aa, Artificial Sequence
  Description of Artificial Sequence: Synthetic peptide
DAPAHISTIGVCSMTDIAKKPTETI

SEQ ID NO: 13730 - protein, 25 aa, Artificial Sequence
  Description of Artificial Sequence: Synthetic peptide
APAHISTIGVCSMTDIAKKPTETIC

SEQ ID NO: 13731 - protein, 25 aa, Artificial Sequence
  Description of Artificial Sequence: Synthetic peptide
GTKRFDNPVLPFNDGVYFASTEKSN

SEQ ID NO: 13732 - protein, 25 aa, Artificial Sequence
  Description of Artificial Sequence: Synthetic peptide
RTTCFSVAALTNNVAFQTVKPGNFN

SEQ ID NO: 13733 - protein, 25 aa, Artificial Sequence
  Description of Artificial Sequence: Synthetic peptide
LTVLPPLLTDEMIAQYTSALLAGTI

SEQ ID NO: 13734 - protein, 25 aa, Artificial Sequence
  Description of Artificial Sequence: Synthetic peptide
LEAPFLYLYALVYFLQSINFVRIIM

SEQ ID NO: 13735 - protein, 25 aa, Artificial Sequence
  Description of Artificial Sequence: Synthetic peptide
GLEAPFLYLYALVYFLQSINFVRII

SEQ ID NO: 13736 - protein, 25 aa, Artificial Sequence
  Description of Artificial Sequence: Synthetic peptide
EAPFLYLYALVYFLQSINFVRIIMR

SEQ ID NO: 13737 - protein, 25 aa, Artificial Sequence
  Description of Artificial Sequence: Synthetic peptide
TVYDPLQPELDSFKEELDKYFKNHT

SEQ ID NO: 13738 - protein, 25 aa, Artificial Sequence
  Description of Artificial Sequence: Synthetic peptide
VVRIKIVQMLSDTLKNLSDRVVFVL

SEQ ID NO: 13739 - protein, 25 aa, Artificial Sequence
  Description of Artificial Sequence: Synthetic peptide
LPWNVVRIKIVQMLSDTLKNLSDRV

SEQ ID NO: 13740 - protein, 25 aa, Artificial Sequence
  Description of Artificial Sequence: Synthetic peptide
NVVRIKIVQMLSDTLKNLSDRVVFV

SEQ ID NO: 13741 - protein, 25 aa, Artificial Sequence
  Description of Artificial Sequence: Synthetic peptide
WNVVRIKIVQMLSDTLKNLSDRVVF

SEQ ID NO: 13742 - protein, 25 aa, Artificial Sequence
  Description of Artificial Sequence: Synthetic peptide
PWNVVRIKIVQMLSDTLKNLSDRVV

SEQ ID NO: 13743 - protein, 25 aa, Artificial Sequence
  Description of Artificial Sequence: Synthetic peptide
TVREVLSDRELHLSWEVGKPRPPLN

SEQ ID NO: 13744 - protein, 25 aa, Artificial Sequence
  Description of Artificial Sequence: Synthetic peptide
ATVREVLSDRELHLSWEVGKPRPPL

SEQ ID NO: 13745 - protein, 25 aa, Artificial Sequence
  Description of Artificial Sequence: Synthetic peptide
VREVLSDRELHLSWEVGKPRPPLNR

SEQ ID NO: 13746 - protein, 25 aa, Artificial Sequence
  Description of Artificial Sequence: Synthetic peptide
VYDPLQPELDSFKEELDKYFKNHTS

SEQ ID NO: 13747 - protein, 25 aa, Artificial Sequence
  Description of Artificial Sequence: Synthetic peptide
PLQPELDSFKEELDKYFKNHTSPDV

SEQ ID NO: 13748 - protein, 25 aa, Artificial Sequence
  Description of Artificial Sequence: Synthetic peptide
DPLQPELDSFKEELDKYFKNHTSPD

SEQ ID NO: 13749 - protein, 25 aa, Artificial Sequence
  Description of Artificial Sequence: Synthetic peptide
YDPLQPELDSFKEELDKYFKNHTSP

SEQ ID NO: 13750 - protein, 25 aa, Artificial Sequence
  Description of Artificial Sequence: Synthetic peptide
PSKRSFIEDLLFNKVTLADAGFIKQ

SEQ ID NO: 13751 - protein, 25 aa, Artificial Sequence
  Description of Artificial Sequence: Synthetic peptide
FLVFLGIITTVAAFHQECSLQSCTQ

SEQ ID NO: 13752 - protein, 25 aa, Artificial Sequence
  Description of Artificial Sequence: Synthetic peptide
LVFLGIITTVAAFHQECSLQSCTQH

SEQ ID NO: 13753 - protein, 25 aa, Artificial Sequence
  Description of Artificial Sequence: Synthetic peptide
PKEITVATSRTLSYYKLGASQRVAG

SEQ ID NO: 13754 - protein, 25 aa, Artificial Sequence
  Description of Artificial Sequence: Synthetic peptide
ESEFRVYSSANNCTFEYVSQPFLMD

SEQ ID NO: 13755 - protein, 25 aa, Artificial Sequence
  Description of Artificial Sequence: Synthetic peptide
QPTESIVRFPNITNLCPFGEVFNAT

SEQ ID NO: 13756 - protein, 25 aa, Artificial Sequence
  Description of Artificial Sequence: Synthetic peptide
DELTGHMLDMYSVMLTNDNTSRYWE

SEQ ID NO: 13757 - protein, 25 aa, Artificial Sequence
  Description of Artificial Sequence: Synthetic peptide
RNLQHRLYECLYRNRDVDTDFVNEF

SEQ ID NO: 13758 - protein, 25 aa, Artificial Sequence
  Description of Artificial Sequence: Synthetic peptide
LPFFYYSDSPCESHGKQVVSDIDYV

SEQ ID NO: 13759 - protein, 25 aa, Artificial Sequence
  Description of Artificial Sequence: Synthetic peptide
QLPFFYYSDSPCESHGKQVVSDIDY

SEQ ID NO: 13760 - protein, 25 aa, Artificial Sequence
  Description of Artificial Sequence: Synthetic peptide
KQLPFFYYSDSPCESHGKQVVSDID

SEQ ID NO: 13761 - protein, 25 aa, Artificial Sequence
  Description of Artificial Sequence: Synthetic peptide
SELVIGAVILRGHLRIAGHHLGRCD

SEQ ID NO: 13762 - protein, 25 aa, Artificial Sequence
  Description of Artificial Sequence: Synthetic peptide
ESELVIGAVILRGHLRIAGHHLGRC

SEQ ID NO: 13763 - protein, 25 aa, Artificial Sequence
  Description of Artificial Sequence: Synthetic peptide
NQDVNLHSSRLSFKELLVYAADPAM

SEQ ID NO: 13764 - protein, 25 aa, Artificial Sequence
  Description of Artificial Sequence: Synthetic peptide
VDRYPANSIVCRFDTRVLSNLNLPG

SEQ ID NO: 13765 - protein, 25 aa, Artificial Sequence
  Description of Artificial Sequence: Synthetic peptide
PAWRKAVFISPYNSQNAVASKILGL

SEQ ID NO: 13766 - protein, 25 aa, Artificial Sequence
  Description of Artificial Sequence: Synthetic peptide
AWRKAVFISPYNSQNAVASKILGLP

SEQ ID NO: 13767 - protein, 25 aa, Artificial Sequence
  Description of Artificial Sequence: Synthetic peptide
TRNPAWRKAVFISPYNSQNAVASKI

SEQ ID NO: 13768 - protein, 25 aa, Artificial Sequence
  Description of Artificial Sequence: Synthetic peptide
RNPAWRKAVFISPYNSQNAVASKIL

SEQ ID NO: 13769 - protein, 25 aa, Artificial Sequence
  Description of Artificial Sequence: Synthetic peptide
NPAWRKAVFISPYNSQNAVASKILG

SEQ ID NO: 13770 - protein, 25 aa, Artificial Sequence
  Description of Artificial Sequence: Synthetic peptide
WRKAVFISPYNSQNAVASKILGLPT

SEQ ID NO: 13771 - protein, 25 aa, Artificial Sequence
  Description of Artificial Sequence: Synthetic peptide
TFKVSIWNLDYIINLIIKNLSKSLT

SEQ ID NO: 13772 - protein, 25 aa, Artificial Sequence
  Description of Artificial Sequence: Synthetic peptide
DSATLPKGIMMNVAKYTQLCQYLNT

SEQ ID NO: 13773 - protein, 25 aa, Artificial Sequence
  Description of Artificial Sequence: Synthetic peptide
SATLPKGIMMNVAKYTQLCQYLNTL

SEQ ID NO: 13774 - protein, 25 aa, Artificial Sequence
  Description of Artificial Sequence: Synthetic peptide
DGNKIADKYVRNLQHRLYECLYRNR

SEQ ID NO: 13775 - protein, 25 aa, Artificial Sequence
  Description of Artificial Sequence: Synthetic peptide
EISMATNYDLSVVNARLRAKHYVYI

SEQ ID NO: 13776 - protein, 25 aa, Artificial Sequence
  Description of Artificial Sequence: Synthetic peptide
ISMATNYDLSVVNARLRAKHYVYIG

SEQ ID NO: 13777 - protein, 25 aa, Artificial Sequence
  Description of Artificial Sequence: Synthetic peptide
ASVYAWNRKRISNCVADYSVLYNSA

SEQ ID NO: 13778 - protein, 25 aa, Artificial Sequence
  Description of Artificial Sequence: Synthetic peptide
AQALNTLVKQLSSNFGAISSVLNDI

SEQ ID NO: 13779 - protein, 25 aa, Artificial Sequence
  Description of Artificial Sequence: Synthetic peptide
YNDKVAGFAKFLKTNCCRFQEKDED

SEQ ID NO: 13780 - protein, 25 aa, Artificial Sequence
  Description of Artificial Sequence: Synthetic peptide
NYDLSVVNARLRAKHYVYIGDPAQL

SEQ ID NO: 13781 - protein, 25 aa, Artificial Sequence
  Description of Artificial Sequence: Synthetic peptide
TNYDLSVVNARLRAKHYVYIGDPAQ

SEQ ID NO: 13782 - protein, 25 aa, Artificial Sequence
  Description of Artificial Sequence: Synthetic peptide
YDLSVVNARLRAKHYVYIGDPAQLP

SEQ ID NO: 13783 - protein, 25 aa, Artificial Sequence
  Description of Artificial Sequence: Synthetic peptide
GKIADYNYKLPDDFTGCVIAWNSNN

SEQ ID NO: 13784 - protein, 25 aa, Artificial Sequence
  Description of Artificial Sequence: Synthetic peptide
KIADYNYKLPDDFTGCVIAWNSNNL

SEQ ID NO: 13785 - protein, 25 aa, Artificial Sequence
  Description of Artificial Sequence: Synthetic peptide
VVYRAFDIYNDKVAGFAKFLKTNCC

SEQ ID NO: 13786 - protein, 25 aa, Artificial Sequence
  Description of Artificial Sequence: Synthetic peptide
TDVVYRAFDIYNDKVAGFAKFLKTN

SEQ ID NO: 13787 - protein, 25 aa, Artificial Sequence
  Description of Artificial Sequence: Synthetic peptide
VYRAFDIYNDKVAGFAKFLKTNCCR

SEQ ID NO: 13788 - protein, 25 aa, Artificial Sequence
  Description of Artificial Sequence: Synthetic peptide
DVVYRAFDIYNDKVAGFAKFLKTNC

SEQ ID NO: 13789 - protein, 25 aa, Artificial Sequence
  Description of Artificial Sequence: Synthetic peptide
MKFLVFLGIITTVAAFHQECSLQSC

SEQ ID NO: 13790 - protein, 25 aa, Artificial Sequence
  Description of Artificial Sequence: Synthetic peptide
SVVNARLRAKHYVYIGDPAQLPAPR

SEQ ID NO: 13791 - protein, 25 aa, Artificial Sequence
  Description of Artificial Sequence: Synthetic peptide
DLSVVNARLRAKHYVYIGDPAQLPA

SEQ ID NO: 13792 - protein, 25 aa, Artificial Sequence
  Description of Artificial Sequence: Synthetic peptide
RIVYTACSHAAVDALCEKALKYLPI

SEQ ID NO: 13793 - protein, 25 aa, Artificial Sequence
  Description of Artificial Sequence: Synthetic peptide
IVYTACSHAAVDALCEKALKYLPID

SEQ ID NO: 13794 - protein, 25 aa, Artificial Sequence
  Description of Artificial Sequence: Synthetic peptide
LVASIKNFKSVLYYQNNVFMSEAKC

SEQ ID NO: 13795 - protein, 25 aa, Artificial Sequence
  Description of Artificial Sequence: Synthetic peptide
GLVASIKNFKSVLYYQNNVFMSEAK

SEQ ID NO: 13796 - protein, 25 aa, Artificial Sequence
  Description of Artificial Sequence: Synthetic peptide
DIYNDKVAGFAKFLKTNCCRFQEKD

SEQ ID NO: 13797 - protein, 25 aa, Artificial Sequence
  Description of Artificial Sequence: Synthetic peptide
MRTFKVSIWNLDYIINLIIKNLSKS

SEQ ID NO: 13798 - protein, 25 aa, Artificial Sequence
  Description of Artificial Sequence: Synthetic peptide
RTFKVSIWNLDYIINLIIKNLSKSL

SEQ ID NO: 13799 - protein, 25 aa, Artificial Sequence
  Description of Artificial Sequence: Synthetic peptide
QKKQQTVTLLPAADLDDFSKQLQQS

SEQ ID NO: 13800 - protein, 25 aa, Artificial Sequence
  Description of Artificial Sequence: Synthetic peptide
SRIIPARARVECFDKFKVNSTLEQY

SEQ ID NO: 13801 - protein, 25 aa, Artificial Sequence
  Description of Artificial Sequence: Synthetic peptide
IIPARARVECFDKFKVNSTLEQYVF

SEQ ID NO: 13802 - protein, 25 aa, Artificial Sequence
  Description of Artificial Sequence: Synthetic peptide
RIIPARARVECFDKFKVNSTLEQYV

SEQ ID NO: 13803 - protein, 25 aa, Artificial Sequence
  Description of Artificial Sequence: Synthetic peptide
VIPTITQMNLKYAISAKNRARTVAG

SEQ ID NO: 13804 - protein, 25 aa, Artificial Sequence
  Description of Artificial Sequence: Synthetic peptide
NVIPTITQMNLKYAISAKNRARTVA

SEQ ID NO: 13805 - protein, 25 aa, Artificial Sequence
  Description of Artificial Sequence: Synthetic peptide
CFNSTYASQGLVASIKNFKSVLYYQ

SEQ ID NO: 13806 - protein, 25 aa, Artificial Sequence
  Description of Artificial Sequence: Synthetic peptide
FNSTYASQGLVASIKNFKSVLYYQN

SEQ ID NO: 13807 - protein, 25 aa, Artificial Sequence
  Description of Artificial Sequence: Synthetic peptide
VAALTNNVAFQTVKPGNFNKDFYDF

SEQ ID NO: 13808 - protein, 25 aa, Artificial Sequence
  Description of Artificial Sequence: Synthetic peptide
AALTNNVAFQTVKPGNFNKDFYDFA

SEQ ID NO: 13809 - protein, 25 aa, Artificial Sequence
  Description of Artificial Sequence: Synthetic peptide
INLVRDLPQGFSALEPLVDLPIGIN

SEQ ID NO: 13810 - protein, 25 aa, Artificial Sequence
  Description of Artificial Sequence: Synthetic peptide
DAQPCSDKAYKIEELFYSYATHSDK

SEQ ID NO: 13811 - protein, 25 aa, Artificial Sequence
  Description of Artificial Sequence: Synthetic peptide
YAWNRKRISNCVADYSVLYNSASFS

SEQ ID NO: 13812 - protein, 25 aa, Artificial Sequence
  Description of Artificial Sequence: Synthetic peptide
AWNRKRISNCVADYSVLYNSASFST

SEQ ID NO: 13813 - protein, 25 aa, Artificial Sequence
  Description of Artificial Sequence: Synthetic peptide
WNRKRISNCVADYSVLYNSASFSTF

SEQ ID NO: 13814 - protein, 25 aa, Artificial Sequence
  Description of Artificial Sequence: Synthetic peptide
ANVNALLSTDGNKIADKYVRNLQHR

SEQ ID NO: 13815 - protein, 25 aa, Artificial Sequence
  Description of Artificial Sequence: Synthetic peptide
NVNALLSTDGNKIADKYVRNLQHRL

SEQ ID NO: 13816 - protein, 25 aa, Artificial Sequence
  Description of Artificial Sequence: Synthetic peptide
TANVNALLSTDGNKIADKYVRNLQH

SEQ ID NO: 13817 - protein, 25 aa, Artificial Sequence
  Description of Artificial Sequence: Synthetic peptide
VNALLSTDGNKIADKYVRNLQHRLY

SEQ ID NO: 13818 - protein, 25 aa, Artificial Sequence
  Description of Artificial Sequence: Synthetic peptide
KSAFVNLKQLPFFYYSDSPCESHGK

SEQ ID NO: 13819 - protein, 25 aa, Artificial Sequence
  Description of Artificial Sequence: Synthetic peptide
KQRRPQGLPNNTASWFTALTQHGKE

SEQ ID NO: 13820 - protein, 25 aa, Artificial Sequence
  Description of Artificial Sequence: Synthetic peptide
KRNVIPTITQMNLKYAISAKNRART

SEQ ID NO: 13821 - protein, 25 aa, Artificial Sequence
  Description of Artificial Sequence: Synthetic peptide
DLPQGFSALEPLVDLPIGINITRFQ

SEQ ID NO: 13822 - protein, 25 aa, Artificial Sequence
  Description of Artificial Sequence: Synthetic peptide
LPQGFSALEPLVDLPIGINITRFQT

SEQ ID NO: 13823 - protein, 25 aa, Artificial Sequence
  Description of Artificial Sequence: Synthetic peptide
CGDSTECSNLLLQYGSFCTQLNRAL

SEQ ID NO: 13824 - protein, 25 aa, Artificial Sequence
  Description of Artificial Sequence: Synthetic peptide
ICGDSTECSNLLLQYGSFCTQLNRA

SEQ ID NO: 13825 - protein, 25 aa, Artificial Sequence
  Description of Artificial Sequence: Synthetic peptide
VTANVNALLSTDGNKIADKYVRNLQ

SEQ ID NO: 13826 - protein, 25 aa, Artificial Sequence
  Description of Artificial Sequence: Synthetic peptide
LPPLLTDEMIAQYTSALLAGTITSG

SEQ ID NO: 13827 - protein, 25 aa, Artificial Sequence
  Description of Artificial Sequence: Synthetic peptide
LLTDEMIAQYTSALLAGTITSGWTF

SEQ ID NO: 13828 - protein, 25 aa, Artificial Sequence
  Description of Artificial Sequence: Synthetic peptide
PLLTDEMIAQYTSALLAGTITSGWT

SEQ ID NO: 13829 - protein, 25 aa, Artificial Sequence
  Description of Artificial Sequence: Synthetic peptide
PPLLTDEMIAQYTSALLAGTITSGW

SEQ ID NO: 13830 - protein, 25 aa, Artificial Sequence
  Description of Artificial Sequence: Synthetic peptide
MWLSYFIASFRLFARTRSMWSFNPE

SEQ ID NO: 13831 - protein, 25 aa, Artificial Sequence
  Description of Artificial Sequence: Synthetic peptide
YYHKNNKSWMESEFRVYSSANNCTF

SEQ ID NO: 13832 - protein, 25 aa, Artificial Sequence
  Description of Artificial Sequence: Synthetic peptide
IMMNVAKYTQLCQYLNTLTLAVPYN

SEQ ID NO: 13833 - protein, 25 aa, Artificial Sequence
  Description of Artificial Sequence: Synthetic peptide
GIMMNVAKYTQLCQYLNTLTLAVPY

SEQ ID NO: 13834 - protein, 25 aa, Artificial Sequence
  Description of Artificial Sequence: Synthetic peptide
MMNVAKYTQLCQYLNTLTLAVPYNM

SEQ ID NO: 13835 - protein, 25 aa, Artificial Sequence
  Description of Artificial Sequence: Synthetic peptide
PHGVVFLHVTYVPAQEKNFTTAPAI

SEQ ID NO: 13836 - protein, 25 aa, Artificial Sequence
  Description of Artificial Sequence: Synthetic peptide
VTIAEILLIIMRTFKVSIWNLDYII

SEQ ID NO: 13837 - protein, 25 aa, Artificial Sequence
  Description of Artificial Sequence: Synthetic peptide
TIAEILLIIMRTFKVSIWNLDYIIN

SEQ ID NO: 13838 - protein, 25 aa, Artificial Sequence
  Description of Artificial Sequence: Synthetic peptide
FQVTIAEILLIIMRTFKVSIWNLDY

SEQ ID NO: 13839 - protein, 25 aa, Artificial Sequence
  Description of Artificial Sequence: Synthetic peptide
IAEILLIIMRTFKVSIWNLDYIINL

SEQ ID NO: 13840 - protein, 25 aa, Artificial Sequence
  Description of Artificial Sequence: Synthetic peptide
QVTIAEILLIIMRTFKVSIWNLDYI

SEQ ID NO: 13841 - protein, 25 aa, Artificial Sequence
  Description of Artificial Sequence: Synthetic peptide
WQLALSKGVHFVCNLLLLFVTVYSH

SEQ ID NO: 13842 - protein, 25 aa, Artificial Sequence
  Description of Artificial Sequence: Synthetic peptide
KRWQLALSKGVHFVCNLLLLFVTVY

SEQ ID NO: 13843 - protein, 25 aa, Artificial Sequence
  Description of Artificial Sequence: Synthetic peptide
RWQLALSKGVHFVCNLLLLFVTVYS

SEQ ID NO: 13844 - protein, 25 aa, Artificial Sequence
  Description of Artificial Sequence: Synthetic peptide
QLALSKGVHFVCNLLLLFVTVYSHL

SEQ ID NO: 13845 - protein, 25 aa, Artificial Sequence
  Description of Artificial Sequence: Synthetic peptide
ASFRLFARTRSMWSFNPETNILLNV

SEQ ID NO: 13846 - protein, 25 aa, Artificial Sequence
  Description of Artificial Sequence: Synthetic peptide
NSVCRLMKTIGPDMFLGTCRRCPAE

SEQ ID NO: 13847 - protein, 25 aa, Artificial Sequence
  Description of Artificial Sequence: Synthetic peptide
NGTITVEELKKLLEQWNLVIGFLFL

SEQ ID NO: 13848 - protein, 25 aa, Artificial Sequence
  Description of Artificial Sequence: Synthetic peptide
LKLRGTAVMSLKEGQINDMILSLLS

SEQ ID NO: 13849 - protein, 25 aa, Artificial Sequence
  Description of Artificial Sequence: Synthetic peptide
KLRGTAVMSLKEGQINDMILSLLSK

SEQ ID NO: 13850 - protein, 25 aa, Artificial Sequence
  Description of Artificial Sequence: Synthetic peptide
LRGTAVMSLKEGQINDMILSLLSKG

SEQ ID NO: 13851 - protein, 25 aa, Artificial Sequence
  Description of Artificial Sequence: Synthetic peptide
RGTAVMSLKEGQINDMILSLLSKGR

SEQ ID NO: 13852 - protein, 25 aa, Artificial Sequence
  Description of Artificial Sequence: Synthetic peptide
EEAIRHVRAWIGFDVEGCHATREAV

SEQ ID NO: 13853 - protein, 25 aa, Artificial Sequence
  Description of Artificial Sequence: Synthetic peptide
TKCTLKSFTVEKGIYQTSNFRVQPT

SEQ ID NO: 13854 - protein, 25 aa, Artificial Sequence
  Description of Artificial Sequence: Synthetic peptide
ETKCTLKSFTVEKGIYQTSNFRVQP

SEQ ID NO: 13855 - protein, 25 aa, Artificial Sequence
  Description of Artificial Sequence: Synthetic peptide
VNIQKEIDRLNEVAKNLNESLIDLQ

SEQ ID NO: 13856 - protein, 25 aa, Artificial Sequence
  Description of Artificial Sequence: Synthetic peptide
VVNIQKEIDRLNEVAKNLNESLIDL

SEQ ID NO: 13857 - protein, 25 aa, Artificial Sequence
  Description of Artificial Sequence: Synthetic peptide
KNIDGYFKIYSKHTPINLVRDLPQG

SEQ ID NO: 13858 - protein, 25 aa, Artificial Sequence
  Description of Artificial Sequence: Synthetic peptide
TECSNLLLQYGSFCTQLNRALTGIA

SEQ ID NO: 13859 - protein, 25 aa, Artificial Sequence
  Description of Artificial Sequence: Synthetic peptide
LMDLEGKQGNFKNLREFVFKNIDGY

SEQ ID NO: 13860 - protein, 25 aa, Artificial Sequence
  Description of Artificial Sequence: Synthetic peptide
LEGKQGNFKNLREFVFKNIDGYFKI

SEQ ID NO: 13861 - protein, 25 aa, Artificial Sequence
  Description of Artificial Sequence: Synthetic peptide
DLEGKQGNFKNLREFVFKNIDGYFK

SEQ ID NO: 13862 - protein, 25 aa, Artificial Sequence
  Description of Artificial Sequence: Synthetic peptide
EGKQGNFKNLREFVFKNIDGYFKIY

SEQ ID NO: 13863 - protein, 25 aa, Artificial Sequence
  Description of Artificial Sequence: Synthetic peptide
FLMDLEGKQGNFKNLREFVFKNIDG

SEQ ID NO: 13864 - protein, 25 aa, Artificial Sequence
  Description of Artificial Sequence: Synthetic peptide
MDLEGKQGNFKNLREFVFKNIDGYF

SEQ ID NO: 13865 - protein, 25 aa, Artificial Sequence
  Description of Artificial Sequence: Synthetic peptide
DAGFIKQYGDCLGDIAARDLICAQK

SEQ ID NO: 13866 - protein, 25 aa, Artificial Sequence
  Description of Artificial Sequence: Synthetic peptide
MKDLSPRWYFYYLGTGPEAGLPYGA

SEQ ID NO: 13867 - protein, 25 aa, Artificial Sequence
  Description of Artificial Sequence: Synthetic peptide
KDLSPRWYFYYLGTGPEAGLPYGAN

SEQ ID NO: 13868 - protein, 25 aa, Artificial Sequence
  Description of Artificial Sequence: Synthetic peptide
KMKDLSPRWYFYYLGTGPEAGLPYG

SEQ ID NO: 13869 - protein, 25 aa, Artificial Sequence
  Description of Artificial Sequence: Synthetic peptide
GKMKDLSPRWYFYYLGTGPEAGLPY

SEQ ID NO: 13870 - protein, 25 aa, Artificial Sequence
  Description of Artificial Sequence: Synthetic peptide
DLSPRWYFYYLGTGPEAGLPYGANK

SEQ ID NO: 13871 - protein, 25 aa, Artificial Sequence
  Description of Artificial Sequence: Synthetic peptide
SEFRVYSSANNCTFEYVSQPFLMDL

SEQ ID NO: 13872 - protein, 25 aa, Artificial Sequence
  Description of Artificial Sequence: Synthetic peptide
QSLENVAFNVVNKGHFDGQQGEVPV

SEQ ID NO: 13873 - protein, 25 aa, Artificial Sequence
  Description of Artificial Sequence: Synthetic peptide
LQSLENVAFNVVNKGHFDGQQGEVP

SEQ ID NO: 13874 - protein, 25 aa, Artificial Sequence
  Description of Artificial Sequence: Synthetic peptide
SHRFYRLANECAQVLSEMVMCGGSL

SEQ ID NO: 13875 - protein, 25 aa, Artificial Sequence
  Description of Artificial Sequence: Synthetic peptide
GCVIAWNSNNLDSKVGGNYNYLYRL

SEQ ID NO: 13876 - protein, 25 aa, Artificial Sequence
  Description of Artificial Sequence: Synthetic peptide
HEETIYNLLKDCPAVAKHDFFKFRI

SEQ ID NO: 13877 - protein, 25 aa, Artificial Sequence
  Description of Artificial Sequence: Synthetic peptide
EETIYNLLKDCPAVAKHDFFKFRID

SEQ ID NO: 13878 - protein, 25 aa, Artificial Sequence
  Description of Artificial Sequence: Synthetic peptide
SLVLARKHTTCCSLSHRFYRLANEC

SEQ ID NO: 13879 - protein, 25 aa, Artificial Sequence
  Description of Artificial Sequence: Synthetic peptide
LVLARKHTTCCSLSHRFYRLANECA

SEQ ID NO: 13880 - protein, 25 aa, Artificial Sequence
  Description of Artificial Sequence: Synthetic peptide
FFKFRIDGDMVPHISRQRLTKYTMA

SEQ ID NO: 13881 - protein, 25 aa, Artificial Sequence
  Description of Artificial Sequence: Synthetic peptide
FKFRIDGDMVPHISRQRLTKYTMAD

SEQ ID NO: 13882 - protein, 25 aa, Artificial Sequence
  Description of Artificial Sequence: Synthetic peptide
FRIDGDMVPHISRQRLTKYTMADLV

SEQ ID NO: 13883 - protein, 25 aa, Artificial Sequence
  Description of Artificial Sequence: Synthetic peptide
RIDGDMVPHISRQRLTKYTMADLVY

SEQ ID NO: 13884 - protein, 25 aa, Artificial Sequence
  Description of Artificial Sequence: Synthetic peptide
DFFKFRIDGDMVPHISRQRLTKYTM

SEQ ID NO: 13885 - protein, 25 aa, Artificial Sequence
  Description of Artificial Sequence: Synthetic peptide
KFRIDGDMVPHISRQRLTKYTMADL

SEQ ID NO: 13886 - protein, 25 aa, Artificial Sequence
  Description of Artificial Sequence: Synthetic peptide
RIMASLVLARKHTTCCSLSHRFYRL

SEQ ID NO: 13887 - protein, 25 aa, Artificial Sequence
  Description of Artificial Sequence: Synthetic peptide
IMASLVLARKHTTCCSLSHRFYRLA

SEQ ID NO: 13888 - protein, 25 aa, Artificial Sequence
  Description of Artificial Sequence: Synthetic peptide
LRIMASLVLARKHTTCCSLSHRFYR

SEQ ID NO: 13889 - protein, 25 aa, Artificial Sequence
  Description of Artificial Sequence: Synthetic peptide
ASLVLARKHTTCCSLSHRFYRLANE

SEQ ID NO: 13890 - protein, 25 aa, Artificial Sequence
  Description of Artificial Sequence: Synthetic peptide
MASLVLARKHTTCCSLSHRFYRLAN

SEQ ID NO: 13891 - protein, 25 aa, Artificial Sequence
  Description of Artificial Sequence: Synthetic peptide
YVRNLQHRLYECLYRNRDVDTDFVN

SEQ ID NO: 13892 - protein, 25 aa, Artificial Sequence
  Description of Artificial Sequence: Synthetic peptide
KYVRNLQHRLYECLYRNRDVDTDFV

SEQ ID NO: 13893 - protein, 25 aa, Artificial Sequence
  Description of Artificial Sequence: Synthetic peptide
DKYVRNLQHRLYECLYRNRDVDTDF

SEQ ID NO: 13894 - protein, 25 aa, Artificial Sequence
  Description of Artificial Sequence: Synthetic peptide
CSNLLLQYGSFCTQLNRALTGIAVE

SEQ ID NO: 13895 - protein, 25 aa, Artificial Sequence
  Description of Artificial Sequence: Synthetic peptide
FLAFVVFLLVTLAILTALRLCAYCC

SEQ ID NO: 13896 - protein, 25 aa, Artificial Sequence
  Description of Artificial Sequence: Synthetic peptide
LLFLAFVVFLLVTLAILTALRLCAY

SEQ ID NO: 13897 - protein, 25 aa, Artificial Sequence
  Description of Artificial Sequence: Synthetic peptide
LFLAFVVFLLVTLAILTALRLCAYC

SEQ ID NO: 13898 - protein, 25 aa, Artificial Sequence
  Description of Artificial Sequence: Synthetic peptide
NARLRAKHYVYIGDPAQLPAPRTLL

SEQ ID NO: 13899 - protein, 25 aa, Artificial Sequence
  Description of Artificial Sequence: Synthetic peptide
VIRGDEVRQIAPGQTGKIADYNYKL

SEQ ID NO: 13900 - protein, 25 aa, Artificial Sequence
  Description of Artificial Sequence: Synthetic peptide
RGDEVRQIAPGQTGKIADYNYKLPD

SEQ ID NO: 13901 - protein, 25 aa, Artificial Sequence
  Description of Artificial Sequence: Synthetic peptide
FVIRGDEVRQIAPGQTGKIADYNYK

SEQ ID NO: 13902 - protein, 25 aa, Artificial Sequence
  Description of Artificial Sequence: Synthetic peptide
IRGDEVRQIAPGQTGKIADYNYKLP

SEQ ID NO: 13903 - protein, 25 aa, Artificial Sequence
  Description of Artificial Sequence: Synthetic peptide
TLLPAADLDDFSKQLQQSMSSADST

SEQ ID NO: 13904 - protein, 25 aa, Artificial Sequence
  Description of Artificial Sequence: Synthetic peptide
LLPAADLDDFSKQLQQSMSSADSTQ

SEQ ID NO: 13905 - protein, 25 aa, Artificial Sequence
  Description of Artificial Sequence: Synthetic peptide
VTLLPAADLDDFSKQLQQSMSSADS

SEQ ID NO: 13906 - protein, 25 aa, Artificial Sequence
  Description of Artificial Sequence: Synthetic peptide
RLITGRLQSLQTYVTQQLIRAAEIR

SEQ ID NO: 13907 - protein, 25 aa, Artificial Sequence
  Description of Artificial Sequence: Synthetic peptide
LITGRLQSLQTYVTQQLIRAAEIRA

SEQ ID NO: 13908 - protein, 25 aa, Artificial Sequence
  Description of Artificial Sequence: Synthetic peptide
DRLITGRLQSLQTYVTQQLIRAAEI

SEQ ID NO: 13909 - protein, 25 aa, Artificial Sequence
  Description of Artificial Sequence: Synthetic peptide
DFVNEFYAYLRKHFSMMILSDDAVV

SEQ ID NO: 13910 - protein, 25 aa, Artificial Sequence
  Description of Artificial Sequence: Synthetic peptide
YDSMSYEDQDALFAYTKRNVIPTIT

SEQ ID NO: 13911 - protein, 25 aa, Artificial Sequence
  Description of Artificial Sequence: Synthetic peptide
NSAIGKIQDSLSSTASALGKLQDVV

SEQ ID NO: 13912 - protein, 25 aa, Artificial Sequence
  Description of Artificial Sequence: Synthetic peptide
FNSAIGKIQDSLSSTASALGKLQDV

SEQ ID NO: 13913 - protein, 25 aa, Artificial Sequence
  Description of Artificial Sequence: Synthetic peptide
QFNSAIGKIQDSLSSTASALGKLQD

SEQ ID NO: 13914 - protein, 25 aa, Artificial Sequence
  Description of Artificial Sequence: Synthetic peptide
NQFNSAIGKIQDSLSSTASALGKLQ

SEQ ID NO: 13915 - protein, 25 aa, Artificial Sequence
  Description of Artificial Sequence: Synthetic peptide
PVPEVKILNNLGVDIAANTVIWDYK

SEQ ID NO: 13916 - protein, 25 aa, Artificial Sequence
  Description of Artificial Sequence: Synthetic peptide
NPDILRVYANLGERVRQALLKTVQF

SEQ ID NO: 13917 - protein, 25 aa, Artificial Sequence
  Description of Artificial Sequence: Synthetic peptide
KWYIRVGARKSAPLIELCVDEAGSK

SEQ ID NO: 13918 - protein, 25 aa, Artificial Sequence
  Description of Artificial Sequence: Synthetic peptide
LQPRTFLLKYNENGTITDAVDCALD

SEQ ID NO: 13919 - protein, 25 aa, Artificial Sequence
  Description of Artificial Sequence: Synthetic peptide
VSDIDYVPLKSATCITRCNLGGAVC

SEQ ID NO: 13920 - protein, 25 aa, Artificial Sequence
  Description of Artificial Sequence: Synthetic peptide
FAIGLALYYPSARIVYTACSHAAVD

SEQ ID NO: 13921 - protein, 25 aa, Artificial Sequence
  Description of Artificial Sequence: Synthetic peptide
AFELWAKRNIKPVPEVKILNNLGVD

SEQ ID NO: 13922 - protein, 25 aa, Artificial Sequence
  Description of Artificial Sequence: Synthetic peptide
FELWAKRNIKPVPEVKILNNLGVDI

SEQ ID NO: 13923 - protein, 25 aa, Artificial Sequence
  Description of Artificial Sequence: Synthetic peptide
TLPKGIMMNVAKYTQLCQYLNTLTL

SEQ ID NO: 13924 - protein, 25 aa, Artificial Sequence
  Description of Artificial Sequence: Synthetic peptide
DSYFVVKRHTFSNYQHEETIYNLLK

SEQ ID NO: 13925 - protein, 25 aa, Artificial Sequence
  Description of Artificial Sequence: Synthetic peptide
VLNDILSRLDKVEAEVQIDRLITGR

SEQ ID NO: 13926 - protein, 25 aa, Artificial Sequence
  Description of Artificial Sequence: Synthetic peptide
SVLNDILSRLDKVEAEVQIDRLITG

SEQ ID NO: 13927 - protein, 25 aa, Artificial Sequence
  Description of Artificial Sequence: Synthetic peptide
ISSVLNDILSRLDKVEAEVQIDRLI

SEQ ID NO: 13928 - protein, 25 aa, Artificial Sequence
  Description of Artificial Sequence: Synthetic peptide
SSVLNDILSRLDKVEAEVQIDRLIT

SEQ ID NO: 13929 - protein, 25 aa, Artificial Sequence
  Description of Artificial Sequence: Synthetic peptide
AISSVLNDILSRLDKVEAEVQIDRL

SEQ ID NO: 13930 - protein, 25 aa, Artificial Sequence
  Description of Artificial Sequence: Synthetic peptide
IVVFDEISMATNYDLSVVNARLRAK

SEQ ID NO: 13931 - protein, 25 aa, Artificial Sequence
  Description of Artificial Sequence: Synthetic peptide
VFDEISMATNYDLSVVNARLRAKHY

SEQ ID NO: 13932 - protein, 25 aa, Artificial Sequence
  Description of Artificial Sequence: Synthetic peptide
VVFDEISMATNYDLSVVNARLRAKH

SEQ ID NO: 13933 - protein, 25 aa, Artificial Sequence
  Description of Artificial Sequence: Synthetic peptide
CDGGSLYVNKHAFHTPAFDKSAFVN

SEQ ID NO: 13934 - protein, 25 aa, Artificial Sequence
  Description of Artificial Sequence: Synthetic peptide
DGGSLYVNKHAFHTPAFDKSAFVNL

SEQ ID NO: 13935 - protein, 25 aa, Artificial Sequence
  Description of Artificial Sequence: Synthetic peptide
LSNLNLPGCDGGSLYVNKHAFHTPA

SEQ ID NO: 13936 - protein, 25 aa, Artificial Sequence
  Description of Artificial Sequence: Synthetic peptide
SNLNLPGCDGGSLYVNKHAFHTPAF

SEQ ID NO: 13937 - protein, 25 aa, Artificial Sequence
  Description of Artificial Sequence: Synthetic peptide
EGVFVSNGTHWFVTQRNFYEPQIIT

SEQ ID NO: 13938 - protein, 25 aa, Artificial Sequence
  Description of Artificial Sequence: Synthetic peptide
YGDCLGDIAARDLICAQKFNGLTVL

SEQ ID NO: 13939 - protein, 25 aa, Artificial Sequence
  Description of Artificial Sequence: Synthetic peptide
QYGDCLGDIAARDLICAQKFNGLTV

SEQ ID NO: 13940 - protein, 25 aa, Artificial Sequence
  Description of Artificial Sequence: Synthetic peptide
KQYGDCLGDIAARDLICAQKFNGLT

SEQ ID NO: 13941 - protein, 25 aa, Artificial Sequence
  Description of Artificial Sequence: Synthetic peptide
ARKHTTCCSLSHRFYRLANECAQVL

SEQ ID NO: 13942 - protein, 25 aa, Artificial Sequence
  Description of Artificial Sequence: Synthetic peptide
FHLYLQYIRKLHDELTGHMLDMYSV

SEQ ID NO: 13943 - protein, 25 aa, Artificial Sequence
  Description of Artificial Sequence: Synthetic peptide
VFHLYLQYIRKLHDELTGHMLDMYS

SEQ ID NO: 13944 - protein, 25 aa, Artificial Sequence
  Description of Artificial Sequence: Synthetic peptide
FDGRVDGQVDLFRNARNGVLITEGS

SEQ ID NO: 13945 - protein, 25 aa, Artificial Sequence
  Description of Artificial Sequence: Synthetic peptide
VDGQVDLFRNARNGVLITEGSVKGL

SEQ ID NO: 13946 - protein, 25 aa, Artificial Sequence
  Description of Artificial Sequence: Synthetic peptide
RVDGQVDLFRNARNGVLITEGSVKG

SEQ ID NO: 13947 - protein, 25 aa, Artificial Sequence
  Description of Artificial Sequence: Synthetic peptide
DGRVDGQVDLFRNARNGVLITEGSV

SEQ ID NO: 13948 - protein, 25 aa, Artificial Sequence
  Description of Artificial Sequence: Synthetic peptide
GRVDGQVDLFRNARNGVLITEGSVK

SEQ ID NO: 13949 - protein, 25 aa, Artificial Sequence
  Description of Artificial Sequence: Synthetic peptide
SINFVRIIMRLWLCWKCRSKNPLLY

SEQ ID NO: 13950 - protein, 25 aa, Artificial Sequence
  Description of Artificial Sequence: Synthetic peptide
QSINFVRIIMRLWLCWKCRSKNPLL

SEQ ID NO: 13951 - protein, 25 aa, Artificial Sequence
  Description of Artificial Sequence: Synthetic peptide
FNKKDWYDFVENPDILRVYANLGER

SEQ ID NO: 13952 - protein, 25 aa, Artificial Sequence
  Description of Artificial Sequence: Synthetic peptide
THWFVTQRNFYEPQIITTDNTFVSG

SEQ ID NO: 13953 - protein, 25 aa, Artificial Sequence
  Description of Artificial Sequence: Synthetic peptide
YDHVISTSHKLVLSVNPYVCNAPGC

SEQ ID NO: 13954 - protein, 25 aa, Artificial Sequence
  Description of Artificial Sequence: Synthetic peptide
CYDHVISTSHKLVLSVNPYVCNAPG

SEQ ID NO: 13955 - protein, 25 aa, Artificial Sequence
  Description of Artificial Sequence: Synthetic peptide
RRPFLCCKCCYDHVISTSHKLVLSV

SEQ ID NO: 13956 - protein, 25 aa, Artificial Sequence
  Description of Artificial Sequence: Synthetic peptide
IRRPFLCCKCCYDHVISTSHKLVLS

SEQ ID NO: 13957 - protein, 25 aa, Artificial Sequence
  Description of Artificial Sequence: Synthetic peptide
YFLQSINFVRIIMRLWLCWKCRSKN

SEQ ID NO: 13958 - protein, 25 aa, Artificial Sequence
  Description of Artificial Sequence: Synthetic peptide
DDIVKTDGTLMIERFVSLAIDAYPL

SEQ ID NO: 13959 - protein, 25 aa, Artificial Sequence
  Description of Artificial Sequence: Synthetic peptide
SANNCTFEYVSQPFLMDLEGKQGNF

SEQ ID NO: 13960 - protein, 25 aa, Artificial Sequence
  Description of Artificial Sequence: Synthetic peptide
ANNCTFEYVSQPFLMDLEGKQGNFK

SEQ ID NO: 13961 - protein, 25 aa, Artificial Sequence
  Description of Artificial Sequence: Synthetic peptide
SSANNCTFEYVSQPFLMDLEGKQGN

SEQ ID NO: 13962 - protein, 25 aa, Artificial Sequence
  Description of Artificial Sequence: Synthetic peptide
PRTLLTKGTLEPEYFNSVCRLMKTI

SEQ ID NO: 13963 - protein, 25 aa, Artificial Sequence
  Description of Artificial Sequence: Synthetic peptide
AQLPAPRTLLTKGTLEPEYFNSVCR

SEQ ID NO: 13964 - protein, 25 aa, Artificial Sequence
  Description of Artificial Sequence: Synthetic peptide
QLPAPRTLLTKGTLEPEYFNSVCRL

SEQ ID NO: 13965 - protein, 25 aa, Artificial Sequence
  Description of Artificial Sequence: Synthetic peptide
WHHSIGFDYVYNPFMIDVQQWGFTG

SEQ ID NO: 13966 - protein, 25 aa, Artificial Sequence
  Description of Artificial Sequence: Synthetic peptide
YACWHHSIGFDYVYNPFMIDVQQWG

SEQ ID NO: 13967 - protein, 25 aa, Artificial Sequence
  Description of Artificial Sequence: Synthetic peptide
CWHHSIGFDYVYNPFMIDVQQWGFT

SEQ ID NO: 13968 - protein, 25 aa, Artificial Sequence
  Description of Artificial Sequence: Synthetic peptide
HHSIGFDYVYNPFMIDVQQWGFTGN

SEQ ID NO: 13969 - protein, 25 aa, Artificial Sequence
  Description of Artificial Sequence: Synthetic peptide
ACWHHSIGFDYVYNPFMIDVQQWGF

SEQ ID NO: 13970 - protein, 25 aa, Artificial Sequence
  Description of Artificial Sequence: Synthetic peptide
VDSSQGSEYDYVIFTQTTETAHSCN

SEQ ID NO: 13971 - protein, 25 aa, Artificial Sequence
  Description of Artificial Sequence: Synthetic peptide
SSQGSEYDYVIFTQTTETAHSCNVN

SEQ ID NO: 13972 - protein, 25 aa, Artificial Sequence
  Description of Artificial Sequence: Synthetic peptide
DSSQGSEYDYVIFTQTTETAHSCNV

SEQ ID NO: 13973 - protein, 25 aa, Artificial Sequence
  Description of Artificial Sequence: Synthetic peptide
FHPLADNKFALTCFSTQFAFACPDG

SEQ ID NO: 13974 - protein, 25 aa, Artificial Sequence
  Description of Artificial Sequence: Synthetic peptide
KWADNNCYLATALLTLQQIELKFNP

SEQ ID NO: 13975 - protein, 25 aa, Artificial Sequence
  Description of Artificial Sequence: Synthetic peptide
WADNNCYLATALLTLQQIELKFNPP

SEQ ID NO: 13976 - protein, 25 aa, Artificial Sequence
  Description of Artificial Sequence: Synthetic peptide
DNNCYLATALLTLQQIELKFNPPAL

SEQ ID NO: 13977 - protein, 25 aa, Artificial Sequence
  Description of Artificial Sequence: Synthetic peptide
SIKWADNNCYLATALLTLQQIELKF

SEQ ID NO: 13978 - protein, 25 aa, Artificial Sequence
  Description of Artificial Sequence: Synthetic peptide
ADNNCYLATALLTLQQIELKFNPPA

SEQ ID NO: 13979 - protein, 25 aa, Artificial Sequence
  Description of Artificial Sequence: Synthetic peptide
IKWADNNCYLATALLTLQQIELKFN

SEQ ID NO: 13980 - protein, 25 aa, Artificial Sequence
  Description of Artificial Sequence: Synthetic peptide
ITNLCPFGEVFNATRFASVYAWNRK

SEQ ID NO: 13981 - protein, 25 aa, Artificial Sequence
  Description of Artificial Sequence: Synthetic peptide
PLADNKFALTCFSTQFAFACPDGVK

SEQ ID NO: 13982 - protein, 25 aa, Artificial Sequence
  Description of Artificial Sequence: Synthetic peptide
YRNRDVDTDFVNEFYAYLRKHFSMM

SEQ ID NO: 13983 - protein, 25 aa, Artificial Sequence
  Description of Artificial Sequence: Synthetic peptide
RNRDVDTDFVNEFYAYLRKHFSMMI

SEQ ID NO: 13984 - protein, 25 aa, Artificial Sequence
  Description of Artificial Sequence: Synthetic peptide
ISNCVADYSVLYNSASFSTFKCYGV

SEQ ID NO: 13985 - protein, 25 aa, Artificial Sequence
  Description of Artificial Sequence: Synthetic peptide
FFSNYLKRRVVFNGVSFSTFEEAAL

SEQ ID NO: 13986 - protein, 25 aa, Artificial Sequence
  Description of Artificial Sequence: Synthetic peptide
FSNYLKRRVVFNGVSFSTFEEAALC

SEQ ID NO: 13987 - protein, 25 aa, Artificial Sequence
  Description of Artificial Sequence: Synthetic peptide
NCVADYSVLYNSASFSTFKCYGVSP

SEQ ID NO: 13988 - protein, 25 aa, Artificial Sequence
  Description of Artificial Sequence: Synthetic peptide
SNCVADYSVLYNSASFSTFKCYGVS

SEQ ID NO: 13989 - protein, 25 aa, Artificial Sequence
  Description of Artificial Sequence: Synthetic peptide
CVADYSVLYNSASFSTFKCYGVSPT

SEQ ID NO: 13990 - protein, 25 aa, Artificial Sequence
  Description of Artificial Sequence: Synthetic peptide
VLKSEDAQGMDNLACEDLKPVSEEV

SEQ ID NO: 13991 - protein, 25 aa, Artificial Sequence
  Description of Artificial Sequence: Synthetic peptide
LTGYKKPASRELKVTFFPDLNGDVV

SEQ ID NO: 13992 - protein, 25 aa, Artificial Sequence
  Description of Artificial Sequence: Synthetic peptide
TSKFYGGWHNMLKTVYSDVENPHLM

SEQ ID NO: 13993 - protein, 25 aa, Artificial Sequence
  Description of Artificial Sequence: Synthetic peptide
YVLPNDDTLRVEAFEYYHTTDPSFL

SEQ ID NO: 13994 - protein, 25 aa, Artificial Sequence
  Description of Artificial Sequence: Synthetic peptide
VLPNDDTLRVEAFEYYHTTDPSFLG

SEQ ID NO: 13995 - protein, 25 aa, Artificial Sequence
  Description of Artificial Sequence: Synthetic peptide
GHTDLMAAYVDNSSLTIKKPNELSR

SEQ ID NO: 13996 - protein, 25 aa, Artificial Sequence
  Description of Artificial Sequence: Synthetic peptide
DIAARDLICAQKFNGLTVLPPLLTD

SEQ ID NO: 13997 - protein, 25 aa, Artificial Sequence
  Description of Artificial Sequence: Synthetic peptide
GDIAARDLICAQKFNGLTVLPPLLT

SEQ ID NO: 13998 - protein, 25 aa, Artificial Sequence
  Description of Artificial Sequence: Synthetic peptide
LGDIAARDLICAQKFNGLTVLPPLL

SEQ ID NO: 13999 - protein, 25 aa, Artificial Sequence
  Description of Artificial Sequence: Synthetic peptide
DKRAKVTSAMQTMLFTMLRKLDNDA

SEQ ID NO: 14000 - protein, 25 aa, Artificial Sequence
  Description of Artificial Sequence: Synthetic peptide
ATHGLAAVNSVPWDTIANYAKPFLN

SEQ ID NO: 14001 - protein, 25 aa, Artificial Sequence
  Description of Artificial Sequence: Synthetic peptide
NDVSFLAHIQWMVMFTPLVPFWITI

SEQ ID NO: 14002 - protein, 25 aa, Artificial Sequence
  Description of Artificial Sequence: Synthetic peptide
MFLARGIVFMCVEYCPIFFITGNTL

SEQ ID NO: 14003 - protein, 25 aa, Artificial Sequence
  Description of Artificial Sequence: Synthetic peptide
PDVDLGDISGINASVVNIQKEIDRL

SEQ ID NO: 14004 - protein, 25 aa, Artificial Sequence
  Description of Artificial Sequence: Synthetic peptide
VDLGDISGINASVVNIQKEIDRLNE

SEQ ID NO: 14005 - protein, 25 aa, Artificial Sequence
  Description of Artificial Sequence: Synthetic peptide
DVDLGDISGINASVVNIQKEIDRLN

SEQ ID NO: 14006 - protein, 25 aa, Artificial Sequence
  Description of Artificial Sequence: Synthetic peptide
SPDVDLGDISGINASVVNIQKEIDR

SEQ ID NO: 14007 - protein, 25 aa, Artificial Sequence
  Description of Artificial Sequence: Synthetic peptide
EDKRAKVTSAMQTMLFTMLRKLDND

SEQ ID NO: 14008 - protein, 25 aa, Artificial Sequence
  Description of Artificial Sequence: Synthetic peptide
EEVTTTLEETKFLTENLLLYIDING

SEQ ID NO: 14009 - protein, 25 aa, Artificial Sequence
  Description of Artificial Sequence: Synthetic peptide
QLFFSYFAVHFISNSWLMWLIINLV

SEQ ID NO: 14010 - protein, 25 aa, Artificial Sequence
  Description of Artificial Sequence: Synthetic peptide
LFFSYFAVHFISNSWLMWLIINLVQ

SEQ ID NO: 14011 - protein, 25 aa, Artificial Sequence
  Description of Artificial Sequence: Synthetic peptide
FFSYFAVHFISNSWLMWLIINLVQM

SEQ ID NO: 14012 - protein, 25 aa, Artificial Sequence
  Description of Artificial Sequence: Synthetic peptide
MQLFFSYFAVHFISNSWLMWLIINL

SEQ ID NO: 14013 - protein, 25 aa, Artificial Sequence
  Description of Artificial Sequence: Synthetic peptide
FSYFAVHFISNSWLMWLIINLVQMA

SEQ ID NO: 14014 - protein, 25 aa, Artificial Sequence
  Description of Artificial Sequence: Synthetic peptide
CIPYNSVTSSIVITSGDGTTSPISE

SEQ ID NO: 14015 - protein, 25 aa, Artificial Sequence
  Description of Artificial Sequence: Synthetic peptide
PDKVFRSSVLHSTQDLFLPFFSNVT

SEQ ID NO: 14016 - protein, 25 aa, Artificial Sequence
  Description of Artificial Sequence: Synthetic peptide
NCTFEYVSQPFLMDLEGKQGNFKNL

SEQ ID NO: 14017 - protein, 25 aa, Artificial Sequence
  Description of Artificial Sequence: Synthetic peptide
LTSHTVMPLSAPTLVPQEHYVRITG

SEQ ID NO: 14018 - protein, 25 aa, Artificial Sequence
  Description of Artificial Sequence: Synthetic peptide
TSHTVMPLSAPTLVPQEHYVRITGL

SEQ ID NO: 14019 - protein, 25 aa, Artificial Sequence
  Description of Artificial Sequence: Synthetic peptide
LWLLWPVTLACFVLAAVYRINWITG

SEQ ID NO: 14020 - protein, 25 aa, Artificial Sequence
  Description of Artificial Sequence: Synthetic peptide
WLLWPVTLACFVLAAVYRINWITGG

SEQ ID NO: 14021 - protein, 25 aa, Artificial Sequence
  Description of Artificial Sequence: Synthetic peptide
WPVTLACFVLAAVYRINWITGGIAI

SEQ ID NO: 14022 - protein, 25 aa, Artificial Sequence
  Description of Artificial Sequence: Synthetic peptide
LLWPVTLACFVLAAVYRINWITGGI

SEQ ID NO: 14023 - protein, 25 aa, Artificial Sequence
  Description of Artificial Sequence: Synthetic peptide
LWPVTLACFVLAAVYRINWITGGIA

SEQ ID NO: 14024 - protein, 25 aa, Artificial Sequence
  Description of Artificial Sequence: Synthetic peptide
VFTTVDNINLHTQVVDMSMTYGQQF

SEQ ID NO: 14025 - protein, 25 aa, Artificial Sequence
  Description of Artificial Sequence: Synthetic peptide
FTTVDNINLHTQVVDMSMTYGQQFG

SEQ ID NO: 14026 - protein, 25 aa, Artificial Sequence
  Description of Artificial Sequence: Synthetic peptide
IKVFTTVDNINLHTQVVDMSMTYGQ

SEQ ID NO: 14027 - protein, 25 aa, Artificial Sequence
  Description of Artificial Sequence: Synthetic peptide
TTVDNINLHTQVVDMSMTYGQQFGP

SEQ ID NO: 14028 - protein, 25 aa, Artificial Sequence
  Description of Artificial Sequence: Synthetic peptide
TVDNINLHTQVVDMSMTYGQQFGPT

SEQ ID NO: 14029 - protein, 25 aa, Artificial Sequence
  Description of Artificial Sequence: Synthetic peptide
KVFTTVDNINLHTQVVDMSMTYGQQ

SEQ ID NO: 14030 - protein, 25 aa, Artificial Sequence
  Description of Artificial Sequence: Synthetic peptide
APFLYLYALVYFLQSINFVRIIMRL

SEQ ID NO: 14031 - protein, 25 aa, Artificial Sequence
  Description of Artificial Sequence: Synthetic peptide
LSSNFGAISSVLNDILSRLDKVEAE

SEQ ID NO: 14032 - protein, 25 aa, Artificial Sequence
  Description of Artificial Sequence: Synthetic peptide
VNALPETTADIVVFDEISMATNYDL

SEQ ID NO: 14033 - protein, 25 aa, Artificial Sequence
  Description of Artificial Sequence: Synthetic peptide
SETKCTLKSFTVEKGIYQTSNFRVQ

SEQ ID NO: 14034 - protein, 25 aa, Artificial Sequence
  Description of Artificial Sequence: Synthetic peptide
QNCVLKLKVDTANPKTPKYKFVRIQ

SEQ ID NO: 14035 - protein, 25 aa, Artificial Sequence
  Description of Artificial Sequence: Synthetic peptide
GHSMQNCVLKLKVDTANPKTPKYKF

SEQ ID NO: 14036 - protein, 25 aa, Artificial Sequence
  Description of Artificial Sequence: Synthetic peptide
MQNCVLKLKVDTANPKTPKYKFVRI

SEQ ID NO: 14037 - protein, 25 aa, Artificial Sequence
  Description of Artificial Sequence: Synthetic peptide
NCVLKLKVDTANPKTPKYKFVRIQP

SEQ ID NO: 14038 - protein, 25 aa, Artificial Sequence
  Description of Artificial Sequence: Synthetic peptide
SMQNCVLKLKVDTANPKTPKYKFVR

SEQ ID NO: 14039 - protein, 25 aa, Artificial Sequence
  Description of Artificial Sequence: Synthetic peptide
HSMQNCVLKLKVDTANPKTPKYKFV

SEQ ID NO: 14040 - protein, 25 aa, Artificial Sequence
  Description of Artificial Sequence: Synthetic peptide
IGHSMQNCVLKLKVDTANPKTPKYK

SEQ ID NO: 14041 - protein, 25 aa, Artificial Sequence
  Description of Artificial Sequence: Synthetic peptide
TDQSSYIVDSVTVKNGSIHLYFDKA

SEQ ID NO: 14042 - protein, 25 aa, Artificial Sequence
  Description of Artificial Sequence: Synthetic peptide
DQSSYIVDSVTVKNGSIHLYFDKAG

SEQ ID NO: 14043 - protein, 25 aa, Artificial Sequence
  Description of Artificial Sequence: Synthetic peptide
QSSYIVDSVTVKNGSIHLYFDKAGQ

SEQ ID NO: 14044 - protein, 25 aa, Artificial Sequence
  Description of Artificial Sequence: Synthetic peptide
SRILGAGCFVDDIVKTDGTLMIERF

SEQ ID NO: 14045 - protein, 25 aa, Artificial Sequence
  Description of Artificial Sequence: Synthetic peptide
RILGAGCFVDDIVKTDGTLMIERFV

SEQ ID NO: 14046 - protein, 25 aa, Artificial Sequence
  Description of Artificial Sequence: Synthetic peptide
AALALLLLDRLNQLESKMSGKGQQQ

SEQ ID NO: 14047 - protein, 25 aa, Artificial Sequence
  Description of Artificial Sequence: Synthetic peptide
DAALALLLLDRLNQLESKMSGKGQQ

SEQ ID NO: 14048 - protein, 25 aa, Artificial Sequence
  Description of Artificial Sequence: Synthetic peptide
SLRLIDAMMFTSDLATNNLVVMAYI

SEQ ID NO: 14049 - protein, 25 aa, Artificial Sequence
  Description of Artificial Sequence: Synthetic peptide
RLIDAMMFTSDLATNNLVVMAYITG

SEQ ID NO: 14050 - protein, 25 aa, Artificial Sequence
  Description of Artificial Sequence: Synthetic peptide
LRLIDAMMFTSDLATNNLVVMAYIT

SEQ ID NO: 14051 - protein, 25 aa, Artificial Sequence
  Description of Artificial Sequence: Synthetic peptide
LIDAMMFTSDLATNNLVVMAYITGG

SEQ ID NO: 14052 - protein, 25 aa, Artificial Sequence
  Description of Artificial Sequence: Synthetic peptide
YPDPSRILGAGCFVDDIVKTDGTLM

SEQ ID NO: 14053 - protein, 25 aa, Artificial Sequence
  Description of Artificial Sequence: Synthetic peptide
PDPSRILGAGCFVDDIVKTDGTLMI

SEQ ID NO: 14054 - protein, 25 aa, Artificial Sequence
  Description of Artificial Sequence: Synthetic peptide
PTESIVRFPNITNLCPFGEVFNATR

SEQ ID NO: 14055 - protein, 25 aa, Artificial Sequence
  Description of Artificial Sequence: Synthetic peptide
VNVSLVKPSFYVYSRVKNLNSSRVP

SEQ ID NO: 14056 - protein, 25 aa, Artificial Sequence
  Description of Artificial Sequence: Synthetic peptide
IVNVSLVKPSFYVYSRVKNLNSSRV

SEQ ID NO: 14057 - protein, 25 aa, Artificial Sequence
  Description of Artificial Sequence: Synthetic peptide
CTGYREGYLNSTNVTIATYCTGSIP

SEQ ID NO: 14058 - protein, 25 aa, Artificial Sequence
  Description of Artificial Sequence: Synthetic peptide
IADYNYKLPDDFTGCVIAWNSNNLD

SEQ ID NO: 14059 - protein, 25 aa, Artificial Sequence
  Description of Artificial Sequence: Synthetic peptide
ATPSDFVRATATIPIQASLPFGWLI

SEQ ID NO: 14060 - protein, 25 aa, Artificial Sequence
  Description of Artificial Sequence: Synthetic peptide
ITREVGFVVPGLPGTILRTTNGDFL

SEQ ID NO: 14061 - protein, 25 aa, Artificial Sequence
  Description of Artificial Sequence: Synthetic peptide
GDISGINASVVNIQKEIDRLNEVAK

SEQ ID NO: 14062 - protein, 25 aa, Artificial Sequence
  Description of Artificial Sequence: Synthetic peptide
DISGINASVVNIQKEIDRLNEVAKN

SEQ ID NO: 14063 - protein, 25 aa, Artificial Sequence
  Description of Artificial Sequence: Synthetic peptide
DGGCINANQVIVNNLDKSAGFPFNK

SEQ ID NO: 14064 - protein, 25 aa, Artificial Sequence
  Description of Artificial Sequence: Synthetic peptide
YDGGCINANQVIVNNLDKSAGFPFN

SEQ ID NO: 14065 - protein, 25 aa, Artificial Sequence
  Description of Artificial Sequence: Synthetic peptide
NLHSSRLSFKELLVYAADPAMHAAS

SEQ ID NO: 14066 - protein, 25 aa, Artificial Sequence
  Description of Artificial Sequence: Synthetic peptide
MLDMYSVMLTNDNTSRYWEPEFYEA

SEQ ID NO: 14067 - protein, 25 aa, Artificial Sequence
  Description of Artificial Sequence: Synthetic peptide
HMLDMYSVMLTNDNTSRYWEPEFYE

SEQ ID NO: 14068 - protein, 25 aa, Artificial Sequence
  Description of Artificial Sequence: Synthetic peptide
KPSKRSFIEDLLFNKVTLADAGFIK

SEQ ID NO: 14069 - protein, 25 aa, Artificial Sequence
  Description of Artificial Sequence: Synthetic peptide
DPSKPSKRSFIEDLLFNKVTLADAG

SEQ ID NO: 14070 - protein, 25 aa, Artificial Sequence
  Description of Artificial Sequence: Synthetic peptide
PSKPSKRSFIEDLLFNKVTLADAGF

SEQ ID NO: 14071 - protein, 25 aa, Artificial Sequence
  Description of Artificial Sequence: Synthetic peptide
SKPSKRSFIEDLLFNKVTLADAGFI

SEQ ID NO: 14072 - protein, 25 aa, Artificial Sequence
  Description of Artificial Sequence: Synthetic peptide
GMEVTPSGTWLTYTGAIKLDDKDPN

SEQ ID NO: 14073 - protein, 25 aa, Artificial Sequence
  Description of Artificial Sequence: Synthetic peptide
RTIKVFTTVDNINLHTQVVDMSMTY

SEQ ID NO: 14074 - protein, 25 aa, Artificial Sequence
  Description of Artificial Sequence: Synthetic peptide
GSLAATVRLQAGNATEVPANSTVLS

SEQ ID NO: 14075 - protein, 25 aa, Artificial Sequence
  Description of Artificial Sequence: Synthetic peptide
PINLVRDLPQGFSALEPLVDLPIGI

SEQ ID NO: 14076 - protein, 25 aa, Artificial Sequence
  Description of Artificial Sequence: Synthetic peptide
DSYYSLLMPILTLTRALTAESHVDT

SEQ ID NO: 14077 - protein, 25 aa, Artificial Sequence
  Description of Artificial Sequence: Synthetic peptide
CFDKFKVNSTLEQYVFCTVNALPET

SEQ ID NO: 14078 - protein, 25 aa, Artificial Sequence
  Description of Artificial Sequence: Synthetic peptide
FDKFKVNSTLEQYVFCTVNALPETT

SEQ ID NO: 14079 - protein, 25 aa, Artificial Sequence
  Description of Artificial Sequence: Synthetic peptide
QDVNLHSSRLSFKELLVYAADPAMH

SEQ ID NO: 14080 - protein, 25 aa, Artificial Sequence
  Description of Artificial Sequence: Synthetic peptide
PFGEVFNATRFASVYAWNRKRISNC

SEQ ID NO: 14081 - protein, 25 aa, Artificial Sequence
  Description of Artificial Sequence: Synthetic peptide
FGEVFNATRFASVYAWNRKRISNCV

SEQ ID NO: 14082 - protein, 25 aa, Artificial Sequence
  Description of Artificial Sequence: Synthetic peptide
QALNTLVKQLSSNFGAISSVLNDIL

SEQ ID NO: 14083 - protein, 25 aa, Artificial Sequence
  Description of Artificial Sequence: Synthetic peptide
NRKRISNCVADYSVLYNSASFSTFK

SEQ ID NO: 14084 - protein, 25 aa, Artificial Sequence
  Description of Artificial Sequence: Synthetic peptide
KYLPIDKCSRIIPARARVECFDKFK

SEQ ID NO: 14085 - protein, 25 aa, Artificial Sequence
  Description of Artificial Sequence: Synthetic peptide
LKYLPIDKCSRIIPARARVECFDKF

SEQ ID NO: 14086 - protein, 25 aa, Artificial Sequence
  Description of Artificial Sequence: Synthetic peptide
YLPIDKCSRIIPARARVECFDKFKV

SEQ ID NO: 14087 - protein, 25 aa, Artificial Sequence
  Description of Artificial Sequence: Synthetic peptide
ALKYLPIDKCSRIIPARARVECFDK

SEQ ID NO: 14088 - protein, 25 aa, Artificial Sequence
  Description of Artificial Sequence: Synthetic peptide
LPIDKCSRIIPARARVECFDKFKVN

SEQ ID NO: 14089 - protein, 25 aa, Artificial Sequence
  Description of Artificial Sequence: Synthetic peptide
DGVYFASTEKSNIIRGWIFGTTLDS

SEQ ID NO: 14090 - protein, 25 aa, Artificial Sequence
  Description of Artificial Sequence: Synthetic peptide
VVDSYYSLLMPILTLTRALTAESHV

SEQ ID NO: 14091 - protein, 25 aa, Artificial Sequence
  Description of Artificial Sequence: Synthetic peptide
VDSYYSLLMPILTLTRALTAESHVD

SEQ ID NO: 14092 - protein, 25 aa, Artificial Sequence
  Description of Artificial Sequence: Synthetic peptide
HTNCYDYCIPYNSVTSSIVITSGDG

SEQ ID NO: 14093 - protein, 25 aa, Artificial Sequence
  Description of Artificial Sequence: Synthetic peptide
GEIKDATPSDFVRATATIPIQASLP

SEQ ID NO: 14094 - protein, 25 aa, Artificial Sequence
  Description of Artificial Sequence: Synthetic peptide
YRGTTTYKLNVGDYFVLTSHTVMPL

SEQ ID NO: 14095 - protein, 25 aa, Artificial Sequence
  Description of Artificial Sequence: Synthetic peptide
IYNDKVAGFAKFLKTNCCRFQEKDE

SEQ ID NO: 14096 - protein, 25 aa, Artificial Sequence
  Description of Artificial Sequence: Synthetic peptide
KKPRQKRTATKAYNVTQAFGRRGPE

SEQ ID NO: 14097 - protein, 25 aa, Artificial Sequence
  Description of Artificial Sequence: Synthetic peptide
PPGDQFKHLIPLMYKGLPWNVVRIK

SEQ ID NO: 14098 - protein, 25 aa, Artificial Sequence
  Description of Artificial Sequence: Synthetic peptide
FCTQLNRALTGIAVEQDKNTQEVFA

SEQ ID NO: 14099 - protein, 25 aa, Artificial Sequence
  Description of Artificial Sequence: Synthetic peptide
SFCTQLNRALTGIAVEQDKNTQEVF

SEQ ID NO: 14100 - protein, 25 aa, Artificial Sequence
  Description of Artificial Sequence: Synthetic peptide
CTQLNRALTGIAVEQDKNTQEVFAQ

SEQ ID NO: 14101 - protein, 25 aa, Artificial Sequence
  Description of Artificial Sequence: Synthetic peptide
TQLNRALTGIAVEQDKNTQEVFAQV

SEQ ID NO: 14102 - protein, 25 aa, Artificial Sequence
  Description of Artificial Sequence: Synthetic peptide
FLKKDAPYIVGDVVQEGVLTAVVIP

SEQ ID NO: 14103 - protein, 25 aa, Artificial Sequence
  Description of Artificial Sequence: Synthetic peptide
TPSGTWLTYTGAIKLDDKDPNFKDQ

SEQ ID NO: 14104 - protein, 25 aa, Artificial Sequence
  Description of Artificial Sequence: Synthetic peptide
YRAFDIYNDKVAGFAKFLKTNCCRF

SEQ ID NO: 14105 - protein, 25 aa, Artificial Sequence
  Description of Artificial Sequence: Synthetic peptide
RAFDIYNDKVAGFAKFLKTNCCRFQ

SEQ ID NO: 14106 - protein, 25 aa, Artificial Sequence
  Description of Artificial Sequence: Synthetic peptide
TTCFSVAALTNNVAFQTVKPGNFNK

SEQ ID NO: 14107 - protein, 25 aa, Artificial Sequence
  Description of Artificial Sequence: Synthetic peptide
CFSVAALTNNVAFQTVKPGNFNKDF

SEQ ID NO: 14108 - protein, 25 aa, Artificial Sequence
  Description of Artificial Sequence: Synthetic peptide
TCFSVAALTNNVAFQTVKPGNFNKD

SEQ ID NO: 14109 - protein, 25 aa, Artificial Sequence
  Description of Artificial Sequence: Synthetic peptide
LSYFIASFRLFARTRSMWSFNPETN

SEQ ID NO: 14110 - protein, 25 aa, Artificial Sequence
  Description of Artificial Sequence: Synthetic peptide
WLSYFIASFRLFARTRSMWSFNPET

SEQ ID NO: 14111 - protein, 25 aa, Artificial Sequence
  Description of Artificial Sequence: Synthetic peptide
SYFIASFRLFARTRSMWSFNPETNI

SEQ ID NO: 14112 - protein, 25 aa, Artificial Sequence
  Description of Artificial Sequence: Synthetic peptide
FIASFRLFARTRSMWSFNPETNILL

SEQ ID NO: 14113 - protein, 25 aa, Artificial Sequence
  Description of Artificial Sequence: Synthetic peptide
YFIASFRLFARTRSMWSFNPETNIL

SEQ ID NO: 14114 - protein, 25 aa, Artificial Sequence
  Description of Artificial Sequence: Synthetic peptide
ALDISASIVAGGIVAIVVTCLAYYF

SEQ ID NO: 14115 - protein, 25 aa, Artificial Sequence
  Description of Artificial Sequence: Synthetic peptide
LDISASIVAGGIVAIVVTCLAYYFM

SEQ ID NO: 14116 - protein, 25 aa, Artificial Sequence
  Description of Artificial Sequence: Synthetic peptide
FDTFNGECPNFVFPLNSIIKTIQPR

SEQ ID NO: 14117 - protein, 25 aa, Artificial Sequence
  Description of Artificial Sequence: Synthetic peptide
NVAKYTQLCQYLNTLTLAVPYNMRV

SEQ ID NO: 14118 - protein, 25 aa, Artificial Sequence
  Description of Artificial Sequence: Synthetic peptide
MNVAKYTQLCQYLNTLTLAVPYNMR

SEQ ID NO: 14119 - protein, 25 aa, Artificial Sequence
  Description of Artificial Sequence: Synthetic peptide
DADSKIVQLSEISMDNSPNLAWPLI

SEQ ID NO: 14120 - protein, 25 aa, Artificial Sequence
  Description of Artificial Sequence: Synthetic peptide
GDKSVYYTSNPTTFHLDGEVITFDN

SEQ ID NO: 14121 - protein, 25 aa, Artificial Sequence
  Description of Artificial Sequence: Synthetic peptide
RGDKSVYYTSNPTTFHLDGEVITFD

SEQ ID NO: 14122 - protein, 25 aa, Artificial Sequence
  Description of Artificial Sequence: Synthetic peptide
IASFRLFARTRSMWSFNPETNILLN

SEQ ID NO: 14123 - protein, 25 aa, Artificial Sequence
  Description of Artificial Sequence: Synthetic peptide
FDIYNDKVAGFAKFLKTNCCRFQEK

SEQ ID NO: 14124 - protein, 25 aa, Artificial Sequence
  Description of Artificial Sequence: Synthetic peptide
TTIKPVTYKLDGVVCTEIDPKLDNY

SEQ ID NO: 14125 - protein, 25 aa, Artificial Sequence
  Description of Artificial Sequence: Synthetic peptide
SVAALTNNVAFQTVKPGNFNKDFYD

SEQ ID NO: 14126 - protein, 25 aa, Artificial Sequence
  Description of Artificial Sequence: Synthetic peptide
KLSYGIATVREVLSDRELHLSWEVG

SEQ ID NO: 14127 - protein, 25 aa, Artificial Sequence
  Description of Artificial Sequence: Synthetic peptide
SGFKLKDCVMYASAVVLLILMTART

SEQ ID NO: 14128 - protein, 25 aa, Artificial Sequence
  Description of Artificial Sequence: Synthetic peptide
GFKLKDCVMYASAVVLLILMTARTV

SEQ ID NO: 14129 - protein, 25 aa, Artificial Sequence
  Description of Artificial Sequence: Synthetic peptide
SLSGFKLKDCVMYASAVVLLILMTA

SEQ ID NO: 14130 - protein, 25 aa, Artificial Sequence
  Description of Artificial Sequence: Synthetic peptide
LSGFKLKDCVMYASAVVLLILMTAR

SEQ ID NO: 14131 - protein, 25 aa, Artificial Sequence
  Description of Artificial Sequence: Synthetic peptide
DLLIRKSNHNFLVQAGNVQLRVIGH

SEQ ID NO: 14132 - protein, 25 aa, Artificial Sequence
  Description of Artificial Sequence: Synthetic peptide
LLIRKSNHNFLVQAGNVQLRVIGHS

SEQ ID NO: 14133 - protein, 25 aa, Artificial Sequence
  Description of Artificial Sequence: Synthetic peptide
LIRKSNHNFLVQAGNVQLRVIGHSM

SEQ ID NO: 14134 - protein, 25 aa, Artificial Sequence
  Description of Artificial Sequence: Synthetic peptide
TQQLIRAAEIRASANLAATKMSECV

SEQ ID NO: 14135 - protein, 25 aa, Artificial Sequence
  Description of Artificial Sequence: Synthetic peptide
QALPQRQKKQQTVTLLPAADLDDFS

SEQ ID NO: 14136 - protein, 25 aa, Artificial Sequence
  Description of Artificial Sequence: Synthetic peptide
FLNRFTTTLNDFNLVAMKYNYEPLT

SEQ ID NO: 14137 - protein, 25 aa, Artificial Sequence
  Description of Artificial Sequence: Synthetic peptide
WFLNRFTTTLNDFNLVAMKYNYEPL

SEQ ID NO: 14138 - protein, 25 aa, Artificial Sequence
  Description of Artificial Sequence: Synthetic peptide
DRWFLNRFTTTLNDFNLVAMKYNYE

SEQ ID NO: 14139 - protein, 25 aa, Artificial Sequence
  Description of Artificial Sequence: Synthetic peptide
NGDRWFLNRFTTTLNDFNLVAMKYN

SEQ ID NO: 14140 - protein, 25 aa, Artificial Sequence
  Description of Artificial Sequence: Synthetic peptide
GDRWFLNRFTTTLNDFNLVAMKYNY

SEQ ID NO: 14141 - protein, 25 aa, Artificial Sequence
  Description of Artificial Sequence: Synthetic peptide
VINGDRWFLNRFTTTLNDFNLVAMK

SEQ ID NO: 14142 - protein, 25 aa, Artificial Sequence
  Description of Artificial Sequence: Synthetic peptide
RWFLNRFTTTLNDFNLVAMKYNYEP

SEQ ID NO: 14143 - protein, 25 aa, Artificial Sequence
  Description of Artificial Sequence: Synthetic peptide
INGDRWFLNRFTTTLNDFNLVAMKY

SEQ ID NO: 14144 - protein, 25 aa, Artificial Sequence
  Description of Artificial Sequence: Synthetic peptide
LIRAAEIRASANLAATKMSECVLGQ

SEQ ID NO: 14145 - protein, 25 aa, Artificial Sequence
  Description of Artificial Sequence: Synthetic peptide
QLIRAAEIRASANLAATKMSECVLG

SEQ ID NO: 14146 - protein, 25 aa, Artificial Sequence
  Description of Artificial Sequence: Synthetic peptide
KCSRIIPARARVECFDKFKVNSTLE

SEQ ID NO: 14147 - protein, 25 aa, Artificial Sequence
  Description of Artificial Sequence: Synthetic peptide
CSRIIPARARVECFDKFKVNSTLEQ

SEQ ID NO: 14148 - protein, 25 aa, Artificial Sequence
  Description of Artificial Sequence: Synthetic peptide
TVLPPLLTDEMIAQYTSALLAGTIT

SEQ ID NO: 14149 - protein, 25 aa, Artificial Sequence
  Description of Artificial Sequence: Synthetic peptide
VLPPLLTDEMIAQYTSALLAGTITS

SEQ ID NO: 14150 - protein, 25 aa, Artificial Sequence
  Description of Artificial Sequence: Synthetic peptide
LKITEEVGHTDLMAAYVDNSSLTIK

SEQ ID NO: 14151 - protein, 25 aa, Artificial Sequence
  Description of Artificial Sequence: Synthetic peptide
NFRVQPTESIVRFPNITNLCPFGEV

SEQ ID NO: 14152 - protein, 25 aa, Artificial Sequence
  Description of Artificial Sequence: Synthetic peptide
FRVQPTESIVRFPNITNLCPFGEVF

SEQ ID NO: 14153 - protein, 25 aa, Artificial Sequence
  Description of Artificial Sequence: Synthetic peptide
KGYGCSCDQLREPMLQSADAQSFLN

SEQ ID NO: 14154 - protein, 25 aa, Artificial Sequence
  Description of Artificial Sequence: Synthetic peptide
RELMRELNGGAYTRYVDNNFCGPDG

SEQ ID NO: 14155 - protein, 25 aa, Artificial Sequence
  Description of Artificial Sequence: Synthetic peptide
MRELNGGAYTRYVDNNFCGPDGYPL

SEQ ID NO: 14156 - protein, 25 aa, Artificial Sequence
  Description of Artificial Sequence: Synthetic peptide
LMRELNGGAYTRYVDNNFCGPDGYP

SEQ ID NO: 14157 - protein, 25 aa, Artificial Sequence
  Description of Artificial Sequence: Synthetic peptide
ELMRELNGGAYTRYVDNNFCGPDGY

SEQ ID NO: 14158 - protein, 25 aa, Artificial Sequence
  Description of Artificial Sequence: Synthetic peptide
RELNGGAYTRYVDNNFCGPDGYPLE

SEQ ID NO: 14159 - protein, 25 aa, Artificial Sequence
  Description of Artificial Sequence: Synthetic peptide
LSPRWYFYYLGTGPEAGLPYGANKD

SEQ ID NO: 14160 - protein, 25 aa, Artificial Sequence
  Description of Artificial Sequence: Synthetic peptide
TSLSGFKLKDCVMYASAVVLLILMT

SEQ ID NO: 14161 - protein, 25 aa, Artificial Sequence
  Description of Artificial Sequence: Synthetic peptide
TNNTFTLKGGAPTKVTFGDDTVIEV

SEQ ID NO: 14162 - protein, 25 aa, Artificial Sequence
  Description of Artificial Sequence: Synthetic peptide
NTFTLKGGAPTKVTFGDDTVIEVQG

SEQ ID NO: 14163 - protein, 25 aa, Artificial Sequence
  Description of Artificial Sequence: Synthetic peptide
NNTFTLKGGAPTKVTFGDDTVIEVQ

SEQ ID NO: 14164 - protein, 25 aa, Artificial Sequence
  Description of Artificial Sequence: Synthetic peptide
VTNNTFTLKGGAPTKVTFGDDTVIE

SEQ ID NO: 14165 - protein, 25 aa, Artificial Sequence
  Description of Artificial Sequence: Synthetic peptide
TDLMAAYVDNSSLTIKKPNELSRVL

SEQ ID NO: 14166 - protein, 25 aa, Artificial Sequence
  Description of Artificial Sequence: Synthetic peptide
RQKKQQTVTLLPAADLDDFSKQLQQ

SEQ ID NO: 14167 - protein, 25 aa, Artificial Sequence
  Description of Artificial Sequence: Synthetic peptide
MPSYCTGYREGYLNSTNVTIATYCT

SEQ ID NO: 14168 - protein, 25 aa, Artificial Sequence
  Description of Artificial Sequence: Synthetic peptide
TTEMLAKALRKVPTDNYITTYPGQG

SEQ ID NO: 14169 - protein, 25 aa, Artificial Sequence
  Description of Artificial Sequence: Synthetic peptide
TEMLAKALRKVPTDNYITTYPGQGL

SEQ ID NO: 14170 - protein, 25 aa, Artificial Sequence
  Description of Artificial Sequence: Synthetic peptide
TETDLTKGPHEFCSQHTMLVKQGDD

SEQ ID NO: 14171 - protein, 25 aa, Artificial Sequence
  Description of Artificial Sequence: Synthetic peptide
YHKNNKSWMESEFRVYSSANNCTFE

SEQ ID NO: 14172 - protein, 25 aa, Artificial Sequence
  Description of Artificial Sequence: Synthetic peptide
ELTGHMLDMYSVMLTNDNTSRYWEP

SEQ ID NO: 14173 - protein, 25 aa, Artificial Sequence
  Description of Artificial Sequence: Synthetic peptide
MESEFRVYSSANNCTFEYVSQPFLM

SEQ ID NO: 14174 - protein, 25 aa, Artificial Sequence
  Description of Artificial Sequence: Synthetic peptide
KNNKSWMESEFRVYSSANNCTFEYV

SEQ ID NO: 14175 - protein, 25 aa, Artificial Sequence
  Description of Artificial Sequence: Synthetic peptide
NKSWMESEFRVYSSANNCTFEYVSQ

SEQ ID NO: 14176 - protein, 25 aa, Artificial Sequence
  Description of Artificial Sequence: Synthetic peptide
KSWMESEFRVYSSANNCTFEYVSQP

SEQ ID NO: 14177 - protein, 25 aa, Artificial Sequence
  Description of Artificial Sequence: Synthetic peptide
NNKSWMESEFRVYSSANNCTFEYVS

SEQ ID NO: 14178 - protein, 25 aa, Artificial Sequence
  Description of Artificial Sequence: Synthetic peptide
SWMESEFRVYSSANNCTFEYVSQPF

SEQ ID NO: 14179 - protein, 25 aa, Artificial Sequence
  Description of Artificial Sequence: Synthetic peptide
WMESEFRVYSSANNCTFEYVSQPFL

SEQ ID NO: 14180 - protein, 25 aa, Artificial Sequence
  Description of Artificial Sequence: Synthetic peptide
GLPWNVVRIKIVQMLSDTLKNLSDR

SEQ ID NO: 14181 - protein, 25 aa, Artificial Sequence
  Description of Artificial Sequence: Synthetic peptide
KGLPWNVVRIKIVQMLSDTLKNLSD

SEQ ID NO: 14182 - protein, 25 aa, Artificial Sequence
  Description of Artificial Sequence: Synthetic peptide
YKGLPWNVVRIKIVQMLSDTLKNLS

SEQ ID NO: 14183 - protein, 25 aa, Artificial Sequence
  Description of Artificial Sequence: Synthetic peptide
DDYIATNGPLKVGGSCVLSGHNLAK

SEQ ID NO: 14184 - protein, 25 aa, Artificial Sequence
  Description of Artificial Sequence: Synthetic peptide
VNARLRAKHYVYIGDPAQLPAPRTL

SEQ ID NO: 14185 - protein, 25 aa, Artificial Sequence
  Description of Artificial Sequence: Synthetic peptide
VVNARLRAKHYVYIGDPAQLPAPRT

SEQ ID NO: 14186 - protein, 25 aa, Artificial Sequence
  Description of Artificial Sequence: Synthetic peptide
LFTRFFYVLGLAAIMQLFFSYFAVH

SEQ ID NO: 14187 - protein, 25 aa, Artificial Sequence
  Description of Artificial Sequence: Synthetic peptide
FTRFFYVLGLAAIMQLFFSYFAVHF

SEQ ID NO: 14188 - protein, 25 aa, Artificial Sequence
  Description of Artificial Sequence: Synthetic peptide
ASYQTQTNSPRRARSVASQSIIAYT

SEQ ID NO: 14189 - protein, 25 aa, Artificial Sequence
  Description of Artificial Sequence: Synthetic peptide
TVGQQDGSEDNQTTTIQTIVEVQPQ

SEQ ID NO: 14190 - protein, 25 aa, Artificial Sequence
  Description of Artificial Sequence: Synthetic peptide
VGQQDGSEDNQTTTIQTIVEVQPQL

SEQ ID NO: 14191 - protein, 25 aa, Artificial Sequence
  Description of Artificial Sequence: Synthetic peptide
SEDNQTTTIQTIVEVQPQLEMELTP

SEQ ID NO: 14192 - protein, 25 aa, Artificial Sequence
  Description of Artificial Sequence: Synthetic peptide
DGSEDNQTTTIQTIVEVQPQLEMEL

SEQ ID NO: 14193 - protein, 25 aa, Artificial Sequence
  Description of Artificial Sequence: Synthetic peptide
QQDGSEDNQTTTIQTIVEVQPQLEM

SEQ ID NO: 14194 - protein, 25 aa, Artificial Sequence
  Description of Artificial Sequence: Synthetic peptide
QDGSEDNQTTTIQTIVEVQPQLEME

SEQ ID NO: 14195 - protein, 25 aa, Artificial Sequence
  Description of Artificial Sequence: Synthetic peptide
GSEDNQTTTIQTIVEVQPQLEMELT

SEQ ID NO: 14196 - protein, 25 aa, Artificial Sequence
  Description of Artificial Sequence: Synthetic peptide
GQQDGSEDNQTTTIQTIVEVQPQLE

SEQ ID NO: 14197 - protein, 25 aa, Artificial Sequence
  Description of Artificial Sequence: Synthetic peptide
VSTSGRWVLNNDYYRSLPGVFCGVD

SEQ ID NO: 14198 - protein, 25 aa, Artificial Sequence
  Description of Artificial Sequence: Synthetic peptide
NLQHRLYECLYRNRDVDTDFVNEFY

SEQ ID NO: 14199 - protein, 25 aa, Artificial Sequence
  Description of Artificial Sequence: Synthetic peptide
KATNNAMQVESDDYIATNGPLKVGG

SEQ ID NO: 14200 - protein, 25 aa, Artificial Sequence
  Description of Artificial Sequence: Synthetic peptide
CNVDRYPANSIVCRFDTRVLSNLNL

SEQ ID NO: 14201 - protein, 25 aa, Artificial Sequence
  Description of Artificial Sequence: Synthetic peptide
NCNVDRYPANSIVCRFDTRVLSNLN

SEQ ID NO: 14202 - protein, 25 aa, Artificial Sequence
  Description of Artificial Sequence: Synthetic peptide
NVDRYPANSIVCRFDTRVLSNLNLP

SEQ ID NO: 14203 - protein, 25 aa, Artificial Sequence
  Description of Artificial Sequence: Synthetic peptide
ATLPKGIMMNVAKYTQLCQYLNTLT

SEQ ID NO: 14204 - protein, 25 aa, Artificial Sequence
  Description of Artificial Sequence: Synthetic peptide
LGLAAIMQLFFSYFAVHFISNSWLM

SEQ ID NO: 14205 - protein, 25 aa, Artificial Sequence
  Description of Artificial Sequence: Synthetic peptide
GISQYSLRLIDAMMFTSDLATNNLV

SEQ ID NO: 14206 - protein, 25 aa, Artificial Sequence
  Description of Artificial Sequence: Synthetic peptide
ISQYSLRLIDAMMFTSDLATNNLVV

SEQ ID NO: 14207 - protein, 25 aa, Artificial Sequence
  Description of Artificial Sequence: Synthetic peptide
SQYSLRLIDAMMFTSDLATNNLVVM

SEQ ID NO: 14208 - protein, 25 aa, Artificial Sequence
  Description of Artificial Sequence: Synthetic peptide
SNNLDSKVGGNYNYLYRLFRKSNLK

SEQ ID NO: 14209 - protein, 25 aa, Artificial Sequence
  Description of Artificial Sequence: Synthetic peptide
NSNNLDSKVGGNYNYLYRLFRKSNL

SEQ ID NO: 14210 - protein, 25 aa, Artificial Sequence
  Description of Artificial Sequence: Synthetic peptide
WNSNNLDSKVGGNYNYLYRLFRKSN

SEQ ID NO: 14211 - protein, 25 aa, Artificial Sequence
  Description of Artificial Sequence: Synthetic peptide
NNLDSKVGGNYNYLYRLFRKSNLKP

SEQ ID NO: 14212 - protein, 25 aa, Artificial Sequence
  Description of Artificial Sequence: Synthetic peptide
CPLIAAVITREVGFVVPGLPGTILR

SEQ ID NO: 14213 - protein, 25 aa, Artificial Sequence
  Description of Artificial Sequence: Synthetic peptide
DLFLPFFSNVTWFHAIHVSGTNGTK

SEQ ID NO: 14214 - protein, 25 aa, Artificial Sequence
  Description of Artificial Sequence: Synthetic peptide
QDLFLPFFSNVTWFHAIHVSGTNGT

SEQ ID NO: 14215 - protein, 25 aa, Artificial Sequence
  Description of Artificial Sequence: Synthetic peptide
TQDLFLPFFSNVTWFHAIHVSGTNG

SEQ ID NO: 14216 - protein, 25 aa, Artificial Sequence
  Description of Artificial Sequence: Synthetic peptide
YDKLQFTSLEIPRRNVATLQAENVT

SEQ ID NO: 14217 - protein, 25 aa, Artificial Sequence
  Description of Artificial Sequence: Synthetic peptide
DLYDKLQFTSLEIPRRNVATLQAEN

SEQ ID NO: 14218 - protein, 25 aa, Artificial Sequence
  Description of Artificial Sequence: Synthetic peptide
LYDKLQFTSLEIPRRNVATLQAENV

SEQ ID NO: 14219 - protein, 25 aa, Artificial Sequence
  Description of Artificial Sequence: Synthetic peptide
LSTDGNKIADKYVRNLQHRLYECLY

SEQ ID NO: 14220 - protein, 25 aa, Artificial Sequence
  Description of Artificial Sequence: Synthetic peptide
ALLSTDGNKIADKYVRNLQHRLYEC

SEQ ID NO: 14221 - protein, 25 aa, Artificial Sequence
  Description of Artificial Sequence: Synthetic peptide
LLSTDGNKIADKYVRNLQHRLYECL

SEQ ID NO: 14222 - protein, 25 aa, Artificial Sequence
  Description of Artificial Sequence: Synthetic peptide
STDGNKIADKYVRNLQHRLYECLYR

SEQ ID NO: 14223 - protein, 25 aa, Artificial Sequence
  Description of Artificial Sequence: Synthetic peptide
DEISMATNYDLSVVNARLRAKHYVY

SEQ ID NO: 14224 - protein, 25 aa, Artificial Sequence
  Description of Artificial Sequence: Synthetic peptide
FDEISMATNYDLSVVNARLRAKHYV

SEQ ID NO: 14225 - protein, 25 aa, Artificial Sequence
  Description of Artificial Sequence: Synthetic peptide
MYSFVSEETGTLIVNSVLLFLAFVV

SEQ ID NO: 14226 - protein, 25 aa, Artificial Sequence
  Description of Artificial Sequence: Synthetic peptide
GVSICSTMTNRQFHQKLLKSIAATR

SEQ ID NO: 14227 - protein, 25 aa, Artificial Sequence
  Description of Artificial Sequence: Synthetic peptide
VSICSTMTNRQFHQKLLKSIAATRG

SEQ ID NO: 14228 - protein, 25 aa, Artificial Sequence
  Description of Artificial Sequence: Synthetic peptide
VSFCYMHHMELPTGVHAGTDLEGNF

SEQ ID NO: 14229 - protein, 25 aa, Artificial Sequence
  Description of Artificial Sequence: Synthetic peptide
DGYPLECIKDLLARAGKASCTLSEQ

SEQ ID NO: 14230 - protein, 25 aa, Artificial Sequence
  Description of Artificial Sequence: Synthetic peptide
WDYPKCDRAMPNMLRIMASLVLARK

SEQ ID NO: 14231 - protein, 25 aa, Artificial Sequence
  Description of Artificial Sequence: Synthetic peptide
MFDAYVNTFSSTFNVPMEKLKTLVA

SEQ ID NO: 14232 - protein, 25 aa, Artificial Sequence
  Description of Artificial Sequence: Synthetic peptide
FDAYVNTFSSTFNVPMEKLKTLVAT

SEQ ID NO: 14233 - protein, 25 aa, Artificial Sequence
  Description of Artificial Sequence: Synthetic peptide
VKMFDAYVNTFSSTFNVPMEKLKTL

SEQ ID NO: 14234 - protein, 25 aa, Artificial Sequence
  Description of Artificial Sequence: Synthetic peptide
KMFDAYVNTFSSTFNVPMEKLKTLV

SEQ ID NO: 14235 - protein, 25 aa, Artificial Sequence
  Description of Artificial Sequence: Synthetic peptide
DAYVNTFSSTFNVPMEKLKTLVATA

SEQ ID NO: 14236 - protein, 25 aa, Artificial Sequence
  Description of Artificial Sequence: Synthetic peptide
LPTGVHAGTDLEGNFYGPFVDRQTA

SEQ ID NO: 14237 - protein, 25 aa, Artificial Sequence
  Description of Artificial Sequence: Synthetic peptide
MELPTGVHAGTDLEGNFYGPFVDRQ

SEQ ID NO: 14238 - protein, 25 aa, Artificial Sequence
  Description of Artificial Sequence: Synthetic peptide
HMELPTGVHAGTDLEGNFYGPFVDR

SEQ ID NO: 14239 - protein, 25 aa, Artificial Sequence
  Description of Artificial Sequence: Synthetic peptide
ELPTGVHAGTDLEGNFYGPFVDRQT

SEQ ID NO: 14240 - protein, 25 aa, Artificial Sequence
  Description of Artificial Sequence: Synthetic peptide
IGAGICASYQTQTNSPRRARSVASQ

SEQ ID NO: 14241 - protein, 25 aa, Artificial Sequence
  Description of Artificial Sequence: Synthetic peptide
PIGAGICASYQTQTNSPRRARSVAS

SEQ ID NO: 14242 - protein, 25 aa, Artificial Sequence
  Description of Artificial Sequence: Synthetic peptide
CTNYMPYFFTLLLQLCTFTRSTNSR

SEQ ID NO: 14243 - protein, 25 aa, Artificial Sequence
  Description of Artificial Sequence: Synthetic peptide
TNYMPYFFTLLLQLCTFTRSTNSRI

SEQ ID NO: 14244 - protein, 25 aa, Artificial Sequence
  Description of Artificial Sequence: Synthetic peptide
SMATNYDLSVVNARLRAKHYVYIGD

SEQ ID NO: 14245 - protein, 25 aa, Artificial Sequence
  Description of Artificial Sequence: Synthetic peptide
MATNYDLSVVNARLRAKHYVYIGDP

SEQ ID NO: 14246 - protein, 25 aa, Artificial Sequence
  Description of Artificial Sequence: Synthetic peptide
NARDGCVPLNIIPLTTAAKLMVVIP

SEQ ID NO: 14247 - protein, 25 aa, Artificial Sequence
  Description of Artificial Sequence: Synthetic peptide
NNARDGCVPLNIIPLTTAAKLMVVI

SEQ ID NO: 14248 - protein, 25 aa, Artificial Sequence
  Description of Artificial Sequence: Synthetic peptide
GPLKVGGSCVLSGHNLAKHCLHVVG

SEQ ID NO: 14249 - protein, 25 aa, Artificial Sequence
  Description of Artificial Sequence: Synthetic peptide
VAIVVTCLAYYFMRFRRAFGEYSHV

SEQ ID NO: 14250 - protein, 25 aa, Artificial Sequence
  Description of Artificial Sequence: Synthetic peptide
GTGTIYTELEPPCRFVTDTPKGPKV

SEQ ID NO: 14251 - protein, 25 aa, Artificial Sequence
  Description of Artificial Sequence: Synthetic peptide
DGTGTIYTELEPPCRFVTDTPKGPK

SEQ ID NO: 14252 - protein, 25 aa, Artificial Sequence
  Description of Artificial Sequence: Synthetic peptide
TGTIYTELEPPCRFVTDTPKGPKVK

SEQ ID NO: 14253 - protein, 25 aa, Artificial Sequence
  Description of Artificial Sequence: Synthetic peptide
EFLKRGDKSVYYTSNPTTFHLDGEV

SEQ ID NO: 14254 - protein, 25 aa, Artificial Sequence
  Description of Artificial Sequence: Synthetic peptide
FLKRGDKSVYYTSNPTTFHLDGEVI

SEQ ID NO: 14255 - protein, 25 aa, Artificial Sequence
  Description of Artificial Sequence: Synthetic peptide
ETKFLTENLLLYIDINGNLHPDSAT

SEQ ID NO: 14256 - protein, 25 aa, Artificial Sequence
  Description of Artificial Sequence: Synthetic peptide
EETKFLTENLLLYIDINGNLHPDSA

SEQ ID NO: 14257 - protein, 25 aa, Artificial Sequence
  Description of Artificial Sequence: Synthetic peptide
EWSMATYYLFDESGEFKLASHMYCS

SEQ ID NO: 14258 - protein, 25 aa, Artificial Sequence
  Description of Artificial Sequence: Synthetic peptide
MATYYLFDESGEFKLASHMYCSFYP

SEQ ID NO: 14259 - protein, 25 aa, Artificial Sequence
  Description of Artificial Sequence: Synthetic peptide
WSMATYYLFDESGEFKLASHMYCSF

SEQ ID NO: 14260 - protein, 25 aa, Artificial Sequence
  Description of Artificial Sequence: Synthetic peptide
SMATYYLFDESGEFKLASHMYCSFY

SEQ ID NO: 14261 - protein, 25 aa, Artificial Sequence
  Description of Artificial Sequence: Synthetic peptide
LKKRWQLALSKGVHFVCNLLLLFVT

SEQ ID NO: 14262 - protein, 25 aa, Artificial Sequence
  Description of Artificial Sequence: Synthetic peptide
EQYVFCTVNALPETTADIVVFDEIS

SEQ ID NO: 14263 - protein, 25 aa, Artificial Sequence
  Description of Artificial Sequence: Synthetic peptide
LEQYVFCTVNALPETTADIVVFDEI

SEQ ID NO: 14264 - protein, 25 aa, Artificial Sequence
  Description of Artificial Sequence: Synthetic peptide
ARIVYTACSHAAVDALCEKALKYLP

SEQ ID NO: 14265 - protein, 25 aa, Artificial Sequence
  Description of Artificial Sequence: Synthetic peptide
TFTRSTNSRIKASMPTTIAKNTVKS

SEQ ID NO: 14266 - protein, 25 aa, Artificial Sequence
  Description of Artificial Sequence: Synthetic peptide
FTRSTNSRIKASMPTTIAKNTVKSV

SEQ ID NO: 14267 - protein, 25 aa, Artificial Sequence
  Description of Artificial Sequence: Synthetic peptide
IGIVNNTVYDPLQPELDSFKEELDK

SEQ ID NO: 14268 - protein, 25 aa, Artificial Sequence
  Description of Artificial Sequence: Synthetic peptide
VNNTVYDPLQPELDSFKEELDKYFK

SEQ ID NO: 14269 - protein, 25 aa, Artificial Sequence
  Description of Artificial Sequence: Synthetic peptide
IVNNTVYDPLQPELDSFKEELDKYF

SEQ ID NO: 14270 - protein, 25 aa, Artificial Sequence
  Description of Artificial Sequence: Synthetic peptide
GIVNNTVYDPLQPELDSFKEELDKY

SEQ ID NO: 14271 - protein, 25 aa, Artificial Sequence
  Description of Artificial Sequence: Synthetic peptide
GYPNMFITREEAIRHVRAWIGFDVE

SEQ ID NO: 14272 - protein, 25 aa, Artificial Sequence
  Description of Artificial Sequence: Synthetic peptide
CLWSTKPVETSNSFDVLKSEDAQGM

SEQ ID NO: 14273 - protein, 25 aa, Artificial Sequence
  Description of Artificial Sequence: Synthetic peptide
QAMTQMYKQARSEDKRAKVTSAMQT

SEQ ID NO: 14274 - protein, 25 aa, Artificial Sequence
  Description of Artificial Sequence: Synthetic peptide
AMTQMYKQARSEDKRAKVTSAMQTM

SEQ ID NO: 14275 - protein, 25 aa, Artificial Sequence
  Description of Artificial Sequence: Synthetic peptide
DQAMTQMYKQARSEDKRAKVTSAMQ

SEQ ID NO: 14276 - protein, 25 aa, Artificial Sequence
  Description of Artificial Sequence: Synthetic peptide
RHVICTSEDMLNPNYEDLLIRKSNH

SEQ ID NO: 14277 - protein, 25 aa, Artificial Sequence
  Description of Artificial Sequence: Synthetic peptide
HVICTSEDMLNPNYEDLLIRKSNHN

SEQ ID NO: 14278 - protein, 25 aa, Artificial Sequence
  Description of Artificial Sequence: Synthetic peptide
RQVVNVVTTKIALKGGKIVNNWLKQ

SEQ ID NO: 14279 - protein, 25 aa, Artificial Sequence
  Description of Artificial Sequence: Synthetic peptide
NVVTTKIALKGGKIVNNWLKQLIKV

SEQ ID NO: 14280 - protein, 25 aa, Artificial Sequence
  Description of Artificial Sequence: Synthetic peptide
VNVVTTKIALKGGKIVNNWLKQLIK

SEQ ID NO: 14281 - protein, 25 aa, Artificial Sequence
  Description of Artificial Sequence: Synthetic peptide
TDPYEDFQENWNTKHSSGVTRELMR

SEQ ID NO: 14282 - protein, 25 aa, Artificial Sequence
  Description of Artificial Sequence: Synthetic peptide
ERSEAGVCVSTSGRWVLNNDYYRSL

SEQ ID NO: 14283 - protein, 25 aa, Artificial Sequence
  Description of Artificial Sequence: Synthetic peptide
RSEAGVCVSTSGRWVLNNDYYRSLP

SEQ ID NO: 14284 - protein, 25 aa, Artificial Sequence
  Description of Artificial Sequence: Synthetic peptide
CERSEAGVCVSTSGRWVLNNDYYRS

SEQ ID NO: 14285 - protein, 25 aa, Artificial Sequence
  Description of Artificial Sequence: Synthetic peptide
SEAGVCVSTSGRWVLNNDYYRSLPG

SEQ ID NO: 14286 - protein, 25 aa, Artificial Sequence
  Description of Artificial Sequence: Synthetic peptide
TCERSEAGVCVSTSGRWVLNNDYYR

SEQ ID NO: 14287 - protein, 25 aa, Artificial Sequence
  Description of Artificial Sequence: Synthetic peptide
LTYNKVENMTPRDLGACIDCSARHI

SEQ ID NO: 14288 - protein, 25 aa, Artificial Sequence
  Description of Artificial Sequence: Synthetic peptide
MLTYNKVENMTPRDLGACIDCSARH

SEQ ID NO: 14289 - protein, 25 aa, Artificial Sequence
  Description of Artificial Sequence: Synthetic peptide
PLKLRGTAVMSLKEGQINDMILSLL

SEQ ID NO: 14290 - protein, 25 aa, Artificial Sequence
  Description of Artificial Sequence: Synthetic peptide
YPNASFDNFKFVCDNIKFADDLNQL

SEQ ID NO: 14291 - protein, 25 aa, Artificial Sequence
  Description of Artificial Sequence: Synthetic peptide
DLGDELGTDPYEDFQENWNTKHSSG

SEQ ID NO: 14292 - protein, 25 aa, Artificial Sequence
  Description of Artificial Sequence: Synthetic peptide
GDELGTDPYEDFQENWNTKHSSGVT

SEQ ID NO: 14293 - protein, 25 aa, Artificial Sequence
  Description of Artificial Sequence: Synthetic peptide
FDLGDELGTDPYEDFQENWNTKHSS

SEQ ID NO: 14294 - protein, 25 aa, Artificial Sequence
  Description of Artificial Sequence: Synthetic peptide
SFDLGDELGTDPYEDFQENWNTKHS

SEQ ID NO: 14295 - protein, 25 aa, Artificial Sequence
  Description of Artificial Sequence: Synthetic peptide
LGDELGTDPYEDFQENWNTKHSSGV

SEQ ID NO: 14296 - protein, 25 aa, Artificial Sequence
  Description of Artificial Sequence: Synthetic peptide
SVTSNYSGVVTTVMFLARGIVFMCV

SEQ ID NO: 14297 - protein, 25 aa, Artificial Sequence
  Description of Artificial Sequence: Synthetic peptide
ENMTPRDLGACIDCSARHINAQVAK

SEQ ID NO: 14298 - protein, 25 aa, Artificial Sequence
  Description of Artificial Sequence: Synthetic peptide
NKVENMTPRDLGACIDCSARHINAQ

SEQ ID NO: 14299 - protein, 25 aa, Artificial Sequence
  Description of Artificial Sequence: Synthetic peptide
NMTPRDLGACIDCSARHINAQVAKS

SEQ ID NO: 14300 - protein, 25 aa, Artificial Sequence
  Description of Artificial Sequence: Synthetic peptide
KVENMTPRDLGACIDCSARHINAQV

SEQ ID NO: 14301 - protein, 25 aa, Artificial Sequence
  Description of Artificial Sequence: Synthetic peptide
TPRDLGACIDCSARHINAQVAKSHN

SEQ ID NO: 14302 - protein, 25 aa, Artificial Sequence
  Description of Artificial Sequence: Synthetic peptide
TYNKVENMTPRDLGACIDCSARHIN

SEQ ID NO: 14303 - protein, 25 aa, Artificial Sequence
  Description of Artificial Sequence: Synthetic peptide
YNKVENMTPRDLGACIDCSARHINA

SEQ ID NO: 14304 - protein, 25 aa, Artificial Sequence
  Description of Artificial Sequence: Synthetic peptide
VENMTPRDLGACIDCSARHINAQVA

SEQ ID NO: 14305 - protein, 25 aa, Artificial Sequence
  Description of Artificial Sequence: Synthetic peptide
MTPRDLGACIDCSARHINAQVAKSH

SEQ ID NO: 14306 - protein, 25 aa, Artificial Sequence
  Description of Artificial Sequence: Synthetic peptide
QRNFYEPQIITTDNTFVSGNCDVVI

SEQ ID NO: 14307 - protein, 25 aa, Artificial Sequence
  Description of Artificial Sequence: Synthetic peptide
TQRNFYEPQIITTDNTFVSGNCDVV

SEQ ID NO: 14308 - protein, 25 aa, Artificial Sequence
  Description of Artificial Sequence: Synthetic peptide
DTFNGECPNFVFPLNSIIKTIQPRV

SEQ ID NO: 14309 - protein, 25 aa, Artificial Sequence
  Description of Artificial Sequence: Synthetic peptide
TFNGECPNFVFPLNSIIKTIQPRVE

SEQ ID NO: 14310 - protein, 25 aa, Artificial Sequence
  Description of Artificial Sequence: Synthetic peptide
LEILQKEKVNINIVGDFKLNEEIAI

SEQ ID NO: 14311 - protein, 25 aa, Artificial Sequence
  Description of Artificial Sequence: Synthetic peptide
EILQKEKVNINIVGDFKLNEEIAII

SEQ ID NO: 14312 - protein, 25 aa, Artificial Sequence
  Description of Artificial Sequence: Synthetic peptide
LLEILQKEKVNINIVGDFKLNEEIA

SEQ ID NO: 14313 - protein, 25 aa, Artificial Sequence
  Description of Artificial Sequence: Synthetic peptide
YTPSFKKGAKLLHKPIVWHVNNATN

SEQ ID NO: 14314 - protein, 25 aa, Artificial Sequence
  Description of Artificial Sequence: Synthetic peptide
SDDAVVCFNSTYASQGLVASIKNFK

SEQ ID NO: 14315 - protein, 25 aa, Artificial Sequence
  Description of Artificial Sequence: Synthetic peptide
LSDDAVVCFNSTYASQGLVASIKNF

SEQ ID NO: 14316 - protein, 25 aa, Artificial Sequence
  Description of Artificial Sequence: Synthetic peptide
LLSVLLSMQGAVDINKLCEEMLDNR

SEQ ID NO: 14317 - protein, 25 aa, Artificial Sequence
  Description of Artificial Sequence: Synthetic peptide
SLLSVLLSMQGAVDINKLCEEMLDN

SEQ ID NO: 14318 - protein, 25 aa, Artificial Sequence
  Description of Artificial Sequence: Synthetic peptide
KLIEYTDFATSACVLAAECTIFKDA

SEQ ID NO: 14319 - protein, 25 aa, Artificial Sequence
  Description of Artificial Sequence: Synthetic peptide
IEYTDFATSACVLAAECTIFKDASG

SEQ ID NO: 14320 - protein, 25 aa, Artificial Sequence
  Description of Artificial Sequence: Synthetic peptide
LIEYTDFATSACVLAAECTIFKDAS

SEQ ID NO: 14321 - protein, 25 aa, Artificial Sequence
  Description of Artificial Sequence: Synthetic peptide
SKLIEYTDFATSACVLAAECTIFKD

SEQ ID NO: 14322 - protein, 25 aa, Artificial Sequence
  Description of Artificial Sequence: Synthetic peptide
SRVSAKPPPGDQFKHLIPLMYKGLP

SEQ ID NO: 14323 - protein, 25 aa, Artificial Sequence
  Description of Artificial Sequence: Synthetic peptide
GGSCVLSGHNLAKHCLHVVGPNVNK

SEQ ID NO: 14324 - protein, 25 aa, Artificial Sequence
  Description of Artificial Sequence: Synthetic peptide
VGGSCVLSGHNLAKHCLHVVGPNVN

SEQ ID NO: 14325 - protein, 25 aa, Artificial Sequence
  Description of Artificial Sequence: Synthetic peptide
EVGPEHSLAEYHNESGLKTILRKGG

SEQ ID NO: 14326 - protein, 25 aa, Artificial Sequence
  Description of Artificial Sequence: Synthetic peptide
VGPEHSLAEYHNESGLKTILRKGGR

SEQ ID NO: 14327 - protein, 25 aa, Artificial Sequence
  Description of Artificial Sequence: Synthetic peptide
LHNWNCVNCDTFCAGSTFISDEVAR

SEQ ID NO: 14328 - protein, 25 aa, Artificial Sequence
  Description of Artificial Sequence: Synthetic peptide
NSYTTTIKPVTYKLDGVVCTEIDPK

SEQ ID NO: 14329 - protein, 25 aa, Artificial Sequence
  Description of Artificial Sequence: Synthetic peptide
KSAPLIELCVDEAGSKSPIQYIDIG

SEQ ID NO: 14330 - protein, 25 aa, Artificial Sequence
  Description of Artificial Sequence: Synthetic peptide
SAPLIELCVDEAGSKSPIQYIDIGN

SEQ ID NO: 14331 - protein, 25 aa, Artificial Sequence
  Description of Artificial Sequence: Synthetic peptide
GARKSAPLIELCVDEAGSKSPIQYI

SEQ ID NO: 14332 - protein, 25 aa, Artificial Sequence
  Description of Artificial Sequence: Synthetic peptide
RKSAPLIELCVDEAGSKSPIQYIDI

SEQ ID NO: 14333 - protein, 25 aa, Artificial Sequence
  Description of Artificial Sequence: Synthetic peptide
ARKSAPLIELCVDEAGSKSPIQYID

SEQ ID NO: 14334 - protein, 25 aa, Artificial Sequence
  Description of Artificial Sequence: Synthetic peptide
VSFSTFEEAALCTFLLNKEMYLKLR

SEQ ID NO: 14335 - protein, 25 aa, Artificial Sequence
  Description of Artificial Sequence: Synthetic peptide
GAISSVLNDILSRLDKVEAEVQIDR

SEQ ID NO: 14336 - protein, 25 aa, Artificial Sequence
  Description of Artificial Sequence: Synthetic peptide
VNINIVGDFKLNEEIAIILASFSAS

SEQ ID NO: 14337 - protein, 25 aa, Artificial Sequence
  Description of Artificial Sequence: Synthetic peptide
QQTVTLLPAADLDDFSKQLQQSMSS

SEQ ID NO: 14338 - protein, 25 aa, Artificial Sequence
  Description of Artificial Sequence: Synthetic peptide
KQQTVTLLPAADLDDFSKQLQQSMS

SEQ ID NO: 14339 - protein, 25 aa, Artificial Sequence
  Description of Artificial Sequence: Synthetic peptide
LMWLSYFIASFRLFARTRSMWSFNP

SEQ ID NO: 14340 - protein, 25 aa, Artificial Sequence
  Description of Artificial Sequence: Synthetic peptide
LPNNTASWFTALTQHGKEDLKFPRG

SEQ ID NO: 14341 - protein, 25 aa, Artificial Sequence
  Description of Artificial Sequence: Synthetic peptide
GLPNNTASWFTALTQHGKEDLKFPR

SEQ ID NO: 14342 - protein, 25 aa, Artificial Sequence
  Description of Artificial Sequence: Synthetic peptide
QGLPNNTASWFTALTQHGKEDLKFP

SEQ ID NO: 14343 - protein, 25 aa, Artificial Sequence
  Description of Artificial Sequence: Synthetic peptide
LVRDLPQGFSALEPLVDLPIGINIT

SEQ ID NO: 14344 - protein, 25 aa, Artificial Sequence
  Description of Artificial Sequence: Synthetic peptide
RDLPQGFSALEPLVDLPIGINITRF

SEQ ID NO: 14345 - protein, 25 aa, Artificial Sequence
  Description of Artificial Sequence: Synthetic peptide
NLVRDLPQGFSALEPLVDLPIGINI

SEQ ID NO: 14346 - protein, 25 aa, Artificial Sequence
  Description of Artificial Sequence: Synthetic peptide
VRDLPQGFSALEPLVDLPIGINITR

SEQ ID NO: 14347 - protein, 25 aa, Artificial Sequence
  Description of Artificial Sequence: Synthetic peptide
LALYNKYKYFSGAMDTTSYREAACC

SEQ ID NO: 14348 - protein, 25 aa, Artificial Sequence
  Description of Artificial Sequence: Synthetic peptide
KYKFVRIQPGQTFSVLACYNGSPSG

SEQ ID NO: 14349 - protein, 25 aa, Artificial Sequence
  Description of Artificial Sequence: Synthetic peptide
RIQPGQTFSVLACYNGSPSGVYQCA

SEQ ID NO: 14350 - protein, 25 aa, Artificial Sequence
  Description of Artificial Sequence: Synthetic peptide
VRIQPGQTFSVLACYNGSPSGVYQC

SEQ ID NO: 14351 - protein, 25 aa, Artificial Sequence
  Description of Artificial Sequence: Synthetic peptide
FVRIQPGQTFSVLACYNGSPSGVYQ

SEQ ID NO: 14352 - protein, 25 aa, Artificial Sequence
  Description of Artificial Sequence: Synthetic peptide
QPGQTFSVLACYNGSPSGVYQCAMR

SEQ ID NO: 14353 - protein, 25 aa, Artificial Sequence
  Description of Artificial Sequence: Synthetic peptide
YKFVRIQPGQTFSVLACYNGSPSGV

SEQ ID NO: 14354 - protein, 25 aa, Artificial Sequence
  Description of Artificial Sequence: Synthetic peptide
KFVRIQPGQTFSVLACYNGSPSGVY

SEQ ID NO: 14355 - protein, 25 aa, Artificial Sequence
  Description of Artificial Sequence: Synthetic peptide
IQPGQTFSVLACYNGSPSGVYQCAM

SEQ ID NO: 14356 - protein, 25 aa, Artificial Sequence
  Description of Artificial Sequence: Synthetic peptide
KGVHFVCNLLLLFVTVYSHLLLVAA

SEQ ID NO: 14357 - protein, 25 aa, Artificial Sequence
  Description of Artificial Sequence: Synthetic peptide
FVCNLLLLFVTVYSHLLLVAAGLEA

SEQ ID NO: 14358 - protein, 25 aa, Artificial Sequence
  Description of Artificial Sequence: Synthetic peptide
CNLLLLFVTVYSHLLLVAAGLEAPF

SEQ ID NO: 14359 - protein, 25 aa, Artificial Sequence
  Description of Artificial Sequence: Synthetic peptide
VCNLLLLFVTVYSHLLLVAAGLEAP

SEQ ID NO: 14360 - protein, 25 aa, Artificial Sequence
  Description of Artificial Sequence: Synthetic peptide
CGSVGFNIDYDCVSFCYMHHMELPT

SEQ ID NO: 14361 - protein, 25 aa, Artificial Sequence
  Description of Artificial Sequence: Synthetic peptide
STECSNLLLQYGSFCTQLNRALTGI

SEQ ID NO: 14362 - protein, 25 aa, Artificial Sequence
  Description of Artificial Sequence: Synthetic peptide
DSTECSNLLLQYGSFCTQLNRALTG

SEQ ID NO: 14363 - protein, 25 aa, Artificial Sequence
  Description of Artificial Sequence: Synthetic peptide
GDSTECSNLLLQYGSFCTQLNRALT

SEQ ID NO: 14364 - protein, 25 aa, Artificial Sequence
  Description of Artificial Sequence: Synthetic peptide
GTITVEELKKLLEQWNLVIGFLFLT

SEQ ID NO: 14365 - protein, 25 aa, Artificial Sequence
  Description of Artificial Sequence: Synthetic peptide
CASYQTQTNSPRRARSVASQSIIAY

SEQ ID NO: 14366 - protein, 25 aa, Artificial Sequence
  Description of Artificial Sequence: Synthetic peptide
QPRVEKKKLDGFMGRIRSVYPVASP

SEQ ID NO: 14367 - protein, 25 aa, Artificial Sequence
  Description of Artificial Sequence: Synthetic peptide
RFASVYAWNRKRISNCVADYSVLYN

SEQ ID NO: 14368 - protein, 25 aa, Artificial Sequence
  Description of Artificial Sequence: Synthetic peptide
FASVYAWNRKRISNCVADYSVLYNS

SEQ ID NO: 14369 - protein, 25 aa, Artificial Sequence
  Description of Artificial Sequence: Synthetic peptide
LPNDDTLRVEAFEYYHTTDPSFLGR

SEQ ID NO: 14370 - protein, 25 aa, Artificial Sequence
  Description of Artificial Sequence: Synthetic peptide
PNDDTLRVEAFEYYHTTDPSFLGRY

SEQ ID NO: 14371 - protein, 25 aa, Artificial Sequence
  Description of Artificial Sequence: Synthetic peptide
SVVNIQKEIDRLNEVAKNLNESLID

SEQ ID NO: 14372 - protein, 25 aa, Artificial Sequence
  Description of Artificial Sequence: Synthetic peptide
LSRVLGLKTLATHGLAAVNSVPWDT

SEQ ID NO: 14373 - protein, 25 aa, Artificial Sequence
  Description of Artificial Sequence: Synthetic peptide
IWFLLLSVCLGSLIYSTAALGVLMS

SEQ ID NO: 14374 - protein, 25 aa, Artificial Sequence
  Description of Artificial Sequence: Synthetic peptide
KGIMMNVAKYTQLCQYLNTLTLAVP

SEQ ID NO: 14375 - protein, 25 aa, Artificial Sequence
  Description of Artificial Sequence: Synthetic peptide
PKGIMMNVAKYTQLCQYLNTLTLAV

SEQ ID NO: 14376 - protein, 25 aa, Artificial Sequence
  Description of Artificial Sequence: Synthetic peptide
TGCVIAWNSNNLDSKVGGNYNYLYR

SEQ ID NO: 14377 - protein, 25 aa, Artificial Sequence
  Description of Artificial Sequence: Synthetic peptide
FTGCVIAWNSNNLDSKVGGNYNYLY

SEQ ID NO: 14378 - protein, 25 aa, Artificial Sequence
  Description of Artificial Sequence: Synthetic peptide
NIDGYFKIYSKHTPINLVRDLPQGF

SEQ ID NO: 14379 - protein, 25 aa, Artificial Sequence
  Description of Artificial Sequence: Synthetic peptide
SDVGDSAEVAVKMFDAYVNTFSSTF

SEQ ID NO: 14380 - protein, 25 aa, Artificial Sequence
  Description of Artificial Sequence: Synthetic peptide
VSDVGDSAEVAVKMFDAYVNTFSST

SEQ ID NO: 14381 - protein, 25 aa, Artificial Sequence
  Description of Artificial Sequence: Synthetic peptide
LNQLTGYKKPASRELKVTFFPDLNG

SEQ ID NO: 14382 - protein, 25 aa, Artificial Sequence
  Description of Artificial Sequence: Synthetic peptide
VGTPVCINGLMLLEIKDTEKYCALA

SEQ ID NO: 14383 - protein, 25 aa, Artificial Sequence
  Description of Artificial Sequence: Synthetic peptide
PLVGTPVCINGLMLLEIKDTEKYCA

SEQ ID NO: 14384 - protein, 25 aa, Artificial Sequence
  Description of Artificial Sequence: Synthetic peptide
GTPVCINGLMLLEIKDTEKYCALAP

SEQ ID NO: 14385 - protein, 25 aa, Artificial Sequence
  Description of Artificial Sequence: Synthetic peptide
LVGTPVCINGLMLLEIKDTEKYCAL

SEQ ID NO: 14386 - protein, 25 aa, Artificial Sequence
  Description of Artificial Sequence: Synthetic peptide
TPVCINGLMLLEIKDTEKYCALAPN

SEQ ID NO: 14387 - protein, 25 aa, Artificial Sequence
  Description of Artificial Sequence: Synthetic peptide
TDDNALAYYNTTKGGRFVLALLSDL

SEQ ID NO: 14388 - protein, 25 aa, Artificial Sequence
  Description of Artificial Sequence: Synthetic peptide
MGRIRSVYPVASPNECNQMCLSTLM

SEQ ID NO: 14389 - protein, 25 aa, Artificial Sequence
  Description of Artificial Sequence: Synthetic peptide
QGAVDINKLCEEMLDNRATLQAIAS

SEQ ID NO: 14390 - protein, 25 aa, Artificial Sequence
  Description of Artificial Sequence: Synthetic peptide
GAVDINKLCEEMLDNRATLQAIASE

SEQ ID NO: 14391 - protein, 25 aa, Artificial Sequence
  Description of Artificial Sequence: Synthetic peptide
DMVDTSLSGFKLKDCVMYASAVVLL

SEQ ID NO: 14392 - protein, 25 aa, Artificial Sequence
  Description of Artificial Sequence: Synthetic peptide
WLDMVDTSLSGFKLKDCVMYASAVV

SEQ ID NO: 14393 - protein, 25 aa, Artificial Sequence
  Description of Artificial Sequence: Synthetic peptide
MVDTSLSGFKLKDCVMYASAVVLLI

SEQ ID NO: 14394 - protein, 25 aa, Artificial Sequence
  Description of Artificial Sequence: Synthetic peptide
LDMVDTSLSGFKLKDCVMYASAVVL

SEQ ID NO: 14395 - protein, 25 aa, Artificial Sequence
  Description of Artificial Sequence: Synthetic peptide
AGTTQTACTDDNALAYYNTTKGGRF

SEQ ID NO: 14396 - protein, 25 aa, Artificial Sequence
  Description of Artificial Sequence: Synthetic peptide
STQYEYGTEDDYQGKPLEFGATSAA

SEQ ID NO: 14397 - protein, 25 aa, Artificial Sequence
  Description of Artificial Sequence: Synthetic peptide
PSTQYEYGTEDDYQGKPLEFGATSA

SEQ ID NO: 14398 - protein, 25 aa, Artificial Sequence
  Description of Artificial Sequence: Synthetic peptide
EPSTQYEYGTEDDYQGKPLEFGATS

SEQ ID NO: 14399 - protein, 25 aa, Artificial Sequence
  Description of Artificial Sequence: Synthetic peptide
QYEYGTEDDYQGKPLEFGATSAALQ

SEQ ID NO: 14400 - protein, 25 aa, Artificial Sequence
  Description of Artificial Sequence: Synthetic peptide
EYGTEDDYQGKPLEFGATSAALQPE

SEQ ID NO: 14401 - protein, 25 aa, Artificial Sequence
  Description of Artificial Sequence: Synthetic peptide
YEYGTEDDYQGKPLEFGATSAALQP

SEQ ID NO: 14402 - protein, 25 aa, Artificial Sequence
  Description of Artificial Sequence: Synthetic peptide
LKLKVDTANPKTPKYKFVRIQPGQT

SEQ ID NO: 14403 - protein, 25 aa, Artificial Sequence
  Description of Artificial Sequence: Synthetic peptide
CTLKSFTVEKGIYQTSNFRVQPTES

SEQ ID NO: 14404 - protein, 25 aa, Artificial Sequence
  Description of Artificial Sequence: Synthetic peptide
AVIKTLQPVSELLTPLGIDLDEWSM

SEQ ID NO: 14405 - protein, 25 aa, Artificial Sequence
  Description of Artificial Sequence: Synthetic peptide
VIKTLQPVSELLTPLGIDLDEWSMA

SEQ ID NO: 14406 - protein, 25 aa, Artificial Sequence
  Description of Artificial Sequence: Synthetic peptide
PRHVICTSEDMLNPNYEDLLIRKSN

SEQ ID NO: 14407 - protein, 25 aa, Artificial Sequence
  Description of Artificial Sequence: Synthetic peptide
AGTDTTITVNVLAWLYAAVINGDRW

SEQ ID NO: 14408 - protein, 25 aa, Artificial Sequence
  Description of Artificial Sequence: Synthetic peptide
DVVNQNAQALNTLVKQLSSNFGAIS

SEQ ID NO: 14409 - protein, 25 aa, Artificial Sequence
  Description of Artificial Sequence: Synthetic peptide
VVNQNAQALNTLVKQLSSNFGAISS

SEQ ID NO: 14410 - protein, 25 aa, Artificial Sequence
  Description of Artificial Sequence: Synthetic peptide
CDIPIGAGICASYQTQTNSPRRARS

SEQ ID NO: 14411 - protein, 25 aa, Artificial Sequence
  Description of Artificial Sequence: Synthetic peptide
ECDIPIGAGICASYQTQTNSPRRAR

SEQ ID NO: 14412 - protein, 25 aa, Artificial Sequence
  Description of Artificial Sequence: Synthetic peptide
YECDIPIGAGICASYQTQTNSPRRA

SEQ ID NO: 14413 - protein, 25 aa, Artificial Sequence
  Description of Artificial Sequence: Synthetic peptide
EVAVKMFDAYVNTFSSTFNVPMEKL

SEQ ID NO: 14414 - protein, 25 aa, Artificial Sequence
  Description of Artificial Sequence: Synthetic peptide
VAVKMFDAYVNTFSSTFNVPMEKLK

SEQ ID NO: 14415 - protein, 25 aa, Artificial Sequence
  Description of Artificial Sequence: Synthetic peptide
GYLPQNAVVKIYCPACHNSEVGPEH

SEQ ID NO: 14416 - protein, 25 aa, Artificial Sequence
  Description of Artificial Sequence: Synthetic peptide
EVPVAIHADQLTPTWRVYSTGSNVF

SEQ ID NO: 14417 - protein, 25 aa, Artificial Sequence
  Description of Artificial Sequence: Synthetic peptide
TEVPVAIHADQLTPTWRVYSTGSNV

SEQ ID NO: 14418 - protein, 25 aa, Artificial Sequence
  Description of Artificial Sequence: Synthetic peptide
CTEVPVAIHADQLTPTWRVYSTGSN

SEQ ID NO: 14419 - protein, 25 aa, Artificial Sequence
  Description of Artificial Sequence: Synthetic peptide
QKVGMQKYSTLQGPPGTGKSHFAIG

SEQ ID NO: 14420 - protein, 25 aa, Artificial Sequence
  Description of Artificial Sequence: Synthetic peptide
KVGMQKYSTLQGPPGTGKSHFAIGL

SEQ ID NO: 14421 - protein, 25 aa, Artificial Sequence
  Description of Artificial Sequence: Synthetic peptide
VDADSKIVQLSEISMDNSPNLAWPL

SEQ ID NO: 14422 - protein, 25 aa, Artificial Sequence
  Description of Artificial Sequence: Synthetic peptide
GEAANFCALILAYCNKTVGELGDVR

SEQ ID NO: 14423 - protein, 25 aa, Artificial Sequence
  Description of Artificial Sequence: Synthetic peptide
RAGEAANFCALILAYCNKTVGELGD

SEQ ID NO: 14424 - protein, 25 aa, Artificial Sequence
  Description of Artificial Sequence: Synthetic peptide
AGEAANFCALILAYCNKTVGELGDV

SEQ ID NO: 14425 - protein, 25 aa, Artificial Sequence
  Description of Artificial Sequence: Synthetic peptide
LVATAEAELAKNVSLDNVLSTFISA

SEQ ID NO: 14426 - protein, 25 aa, Artificial Sequence
  Description of Artificial Sequence: Synthetic peptide
VATAEAELAKNVSLDNVLSTFISAA

SEQ ID NO: 14427 - protein, 25 aa, Artificial Sequence
  Description of Artificial Sequence: Synthetic peptide
PGVYSVIYLYLTFYLTNDVSFLAHI

SEQ ID NO: 14428 - protein, 25 aa, Artificial Sequence
  Description of Artificial Sequence: Synthetic peptide
LPGVYSVIYLYLTFYLTNDVSFLAH

SEQ ID NO: 14429 - protein, 25 aa, Artificial Sequence
  Description of Artificial Sequence: Synthetic peptide
NFCALILAYCNKTVGELGDVRETMS

SEQ ID NO: 14430 - protein, 25 aa, Artificial Sequence
  Description of Artificial Sequence: Synthetic peptide
CALILAYCNKTVGELGDVRETMSYL

SEQ ID NO: 14431 - protein, 25 aa, Artificial Sequence
  Description of Artificial Sequence: Synthetic peptide
FCALILAYCNKTVGELGDVRETMSY

SEQ ID NO: 14432 - protein, 25 aa, Artificial Sequence
  Description of Artificial Sequence: Synthetic peptide
KSNHNFLVQAGNVQLRVIGHSMQNC

SEQ ID NO: 14433 - protein, 25 aa, Artificial Sequence
  Description of Artificial Sequence: Synthetic peptide
RKSNHNFLVQAGNVQLRVIGHSMQN

SEQ ID NO: 14434 - protein, 25 aa, Artificial Sequence
  Description of Artificial Sequence: Synthetic peptide
RYFRLTLGVYDYLVSTQEFRYMNSQ

SEQ ID NO: 14435 - protein, 25 aa, Artificial Sequence
  Description of Artificial Sequence: Synthetic peptide
LMSFPQSAPHGVVFLHVTYVPAQEK

SEQ ID NO: 14436 - protein, 25 aa, Artificial Sequence
  Description of Artificial Sequence: Synthetic peptide
NALAYYNTTKGGRFVLALLSDLQDL

SEQ ID NO: 14437 - protein, 25 aa, Artificial Sequence
  Description of Artificial Sequence: Synthetic peptide
YQGKPLEFGATSAALQPEEEQEEDW

SEQ ID NO: 14438 - protein, 25 aa, Artificial Sequence
  Description of Artificial Sequence: Synthetic peptide
KPLEFGATSAALQPEEEQEEDWLDD

SEQ ID NO: 14439 - protein, 25 aa, Artificial Sequence
  Description of Artificial Sequence: Synthetic peptide
DYQGKPLEFGATSAALQPEEEQEED

SEQ ID NO: 14440 - protein, 25 aa, Artificial Sequence
  Description of Artificial Sequence: Synthetic peptide
DDYQGKPLEFGATSAALQPEEEQEE

SEQ ID NO: 14441 - protein, 25 aa, Artificial Sequence
  Description of Artificial Sequence: Synthetic peptide
QGKPLEFGATSAALQPEEEQEEDWL

SEQ ID NO: 14442 - protein, 25 aa, Artificial Sequence
  Description of Artificial Sequence: Synthetic peptide
GKPLEFGATSAALQPEEEQEEDWLD

SEQ ID NO: 14443 - protein, 25 aa, Artificial Sequence
  Description of Artificial Sequence: Synthetic peptide
VMFTPLVPFWITIAYIICISTKHFY

SEQ ID NO: 14444 - protein, 25 aa, Artificial Sequence
  Description of Artificial Sequence: Synthetic peptide
KGGKIVNNWLKQLIKVTLVFLFVAA

SEQ ID NO: 14445 - protein, 25 aa, Artificial Sequence
  Description of Artificial Sequence: Synthetic peptide
FKLKDCVMYASAVVLLILMTARTVY

SEQ ID NO: 14446 - protein, 25 aa, Artificial Sequence
  Description of Artificial Sequence: Synthetic peptide
PQTSITSAVLQSGFRKMAFPSGKVE

SEQ ID NO: 14447 - protein, 25 aa, Artificial Sequence
  Description of Artificial Sequence: Synthetic peptide
QTSITSAVLQSGFRKMAFPSGKVEG

SEQ ID NO: 14448 - protein, 25 aa, Artificial Sequence
  Description of Artificial Sequence: Synthetic peptide
LNRFTTTLNDFNLVAMKYNYEPLTQ

SEQ ID NO: 14449 - protein, 25 aa, Artificial Sequence
  Description of Artificial Sequence: Synthetic peptide
PINVIVFDGKSKCEESSAKSASVYY

SEQ ID NO: 14450 - protein, 25 aa, Artificial Sequence
  Description of Artificial Sequence: Synthetic peptide
QLSLPVLQVRDVLVRGFGDSVEEVL

SEQ ID NO: 14451 - protein, 25 aa, Artificial Sequence
  Description of Artificial Sequence: Synthetic peptide
HVQLSLPVLQVRDVLVRGFGDSVEE

SEQ ID NO: 14452 - protein, 25 aa, Artificial Sequence
  Description of Artificial Sequence: Synthetic peptide
VQLSLPVLQVRDVLVRGFGDSVEEV

SEQ ID NO: 14453 - protein, 25 aa, Artificial Sequence
  Description of Artificial Sequence: Synthetic peptide
LSLPVLQVRDVLVRGFGDSVEEVLS

SEQ ID NO: 14454 - protein, 25 aa, Artificial Sequence
  Description of Artificial Sequence: Synthetic peptide
EDDYQGKPLEFGATSAALQPEEEQE

SEQ ID NO: 14455 - protein, 25 aa, Artificial Sequence
  Description of Artificial Sequence: Synthetic peptide
TEDDYQGKPLEFGATSAALQPEEEQ

SEQ ID NO: 14456 - protein, 25 aa, Artificial Sequence
  Description of Artificial Sequence: Synthetic peptide
YLFQHANLDSCKRVLNVVCKTCGQQ

SEQ ID NO: 14457 - protein, 25 aa, Artificial Sequence
  Description of Artificial Sequence: Synthetic peptide
IDRLITGRLQSLQTYVTQQLIRAAE

SEQ ID NO: 14458 - protein, 25 aa, Artificial Sequence
  Description of Artificial Sequence: Synthetic peptide
VQIDRLITGRLQSLQTYVTQQLIRA

SEQ ID NO: 14459 - protein, 25 aa, Artificial Sequence
  Description of Artificial Sequence: Synthetic peptide
QIDRLITGRLQSLQTYVTQQLIRAA

SEQ ID NO: 14460 - protein, 25 aa, Artificial Sequence
  Description of Artificial Sequence: Synthetic peptide
EVQIDRLITGRLQSLQTYVTQQLIR

SEQ ID NO: 14461 - protein, 25 aa, Artificial Sequence
  Description of Artificial Sequence: Synthetic peptide
PKSDGTGTIYTELEPPCRFVTDTPK

SEQ ID NO: 14462 - protein, 25 aa, Artificial Sequence
  Description of Artificial Sequence: Synthetic peptide
YCPIFFITGNTLQCIMLVYCFLGYF

SEQ ID NO: 14463 - protein, 25 aa, Artificial Sequence
  Description of Artificial Sequence: Synthetic peptide
EYCPIFFITGNTLQCIMLVYCFLGY

SEQ ID NO: 14464 - protein, 25 aa, Artificial Sequence
  Description of Artificial Sequence: Synthetic peptide
IVFMCVEYCPIFFITGNTLQCIMLV

SEQ ID NO: 14465 - protein, 25 aa, Artificial Sequence
  Description of Artificial Sequence: Synthetic peptide
CVEYCPIFFITGNTLQCIMLVYCFL

SEQ ID NO: 14466 - protein, 25 aa, Artificial Sequence
  Description of Artificial Sequence: Synthetic peptide
MCVEYCPIFFITGNTLQCIMLVYCF

SEQ ID NO: 14467 - protein, 25 aa, Artificial Sequence
  Description of Artificial Sequence: Synthetic peptide
VEYCPIFFITGNTLQCIMLVYCFLG

SEQ ID NO: 14468 - protein, 25 aa, Artificial Sequence
  Description of Artificial Sequence: Synthetic peptide
FMCVEYCPIFFITGNTLQCIMLVYC

SEQ ID NO: 14469 - protein, 25 aa, Artificial Sequence
  Description of Artificial Sequence: Synthetic peptide
VFMCVEYCPIFFITGNTLQCIMLVY

SEQ ID NO: 14470 - protein, 25 aa, Artificial Sequence
  Description of Artificial Sequence: Synthetic peptide
SDLQDLKWARFPKSDGTGTIYTELE

SEQ ID NO: 14471 - protein, 25 aa, Artificial Sequence
  Description of Artificial Sequence: Synthetic peptide
PKGPKVKYLYFIKGLNNLNRGMVLG

SEQ ID NO: 14472 - protein, 25 aa, Artificial Sequence
  Description of Artificial Sequence: Synthetic peptide
DTPKGPKVKYLYFIKGLNNLNRGMV

SEQ ID NO: 14473 - protein, 25 aa, Artificial Sequence
  Description of Artificial Sequence: Synthetic peptide
TPKGPKVKYLYFIKGLNNLNRGMVL

SEQ ID NO: 14474 - protein, 25 aa, Artificial Sequence
  Description of Artificial Sequence: Synthetic peptide
TDTPKGPKVKYLYFIKGLNNLNRGM

SEQ ID NO: 14475 - protein, 25 aa, Artificial Sequence
  Description of Artificial Sequence: Synthetic peptide
VLSGHNLAKHCLHVVGPNVNKGEDI

SEQ ID NO: 14476 - protein, 25 aa, Artificial Sequence
  Description of Artificial Sequence: Synthetic peptide
LSGHNLAKHCLHVVGPNVNKGEDIQ

SEQ ID NO: 14477 - protein, 25 aa, Artificial Sequence
  Description of Artificial Sequence: Synthetic peptide
RELKVTFFPDLNGDVVAIDYKHYTP

SEQ ID NO: 14478 - protein, 25 aa, Artificial Sequence
  Description of Artificial Sequence: Synthetic peptide
VLQVRDVLVRGFGDSVEEVLSEARQ

SEQ ID NO: 14479 - protein, 25 aa, Artificial Sequence
  Description of Artificial Sequence: Synthetic peptide
LQVRDVLVRGFGDSVEEVLSEARQH

SEQ ID NO: 14480 - protein, 25 aa, Artificial Sequence
  Description of Artificial Sequence: Synthetic peptide
QVRDVLVRGFGDSVEEVLSEARQHL

SEQ ID NO: 14481 - protein, 25 aa, Artificial Sequence
  Description of Artificial Sequence: Synthetic peptide
PVLQVRDVLVRGFGDSVEEVLSEAR

SEQ ID NO: 14482 - protein, 25 aa, Artificial Sequence
  Description of Artificial Sequence: Synthetic peptide
RKHTTCCSLSHRFYRLANECAQVLS

SEQ ID NO: 14483 - protein, 25 aa, Artificial Sequence
  Description of Artificial Sequence: Synthetic peptide
YQKVGMQKYSTLQGPPGTGKSHFAI

SEQ ID NO: 14484 - protein, 25 aa, Artificial Sequence
  Description of Artificial Sequence: Synthetic peptide
ANYQKVGMQKYSTLQGPPGTGKSHF

SEQ ID NO: 14485 - protein, 25 aa, Artificial Sequence
  Description of Artificial Sequence: Synthetic peptide
NYQKVGMQKYSTLQGPPGTGKSHFA

SEQ ID NO: 14486 - protein, 25 aa, Artificial Sequence
  Description of Artificial Sequence: Synthetic peptide
VANYQKVGMQKYSTLQGPPGTGKSH

SEQ ID NO: 14487 - protein, 25 aa, Artificial Sequence
  Description of Artificial Sequence: Synthetic peptide
VRRSFYVYANGGKGFCKLHNWNCVN

SEQ ID NO: 14488 - protein, 25 aa, Artificial Sequence
  Description of Artificial Sequence: Synthetic peptide
AKNRARTVAGVSICSTMTNRQFHQK

SEQ ID NO: 14489 - protein, 25 aa, Artificial Sequence
  Description of Artificial Sequence: Synthetic peptide
VAGVSICSTMTNRQFHQKLLKSIAA

SEQ ID NO: 14490 - protein, 25 aa, Artificial Sequence
  Description of Artificial Sequence: Synthetic peptide
AGVSICSTMTNRQFHQKLLKSIAAT

SEQ ID NO: 14491 - protein, 25 aa, Artificial Sequence
  Description of Artificial Sequence: Synthetic peptide
ARTVAGVSICSTMTNRQFHQKLLKS

SEQ ID NO: 14492 - protein, 25 aa, Artificial Sequence
  Description of Artificial Sequence: Synthetic peptide
TVAGVSICSTMTNRQFHQKLLKSIA

SEQ ID NO: 14493 - protein, 25 aa, Artificial Sequence
  Description of Artificial Sequence: Synthetic peptide
RARTVAGVSICSTMTNRQFHQKLLK

SEQ ID NO: 14494 - protein, 25 aa, Artificial Sequence
  Description of Artificial Sequence: Synthetic peptide
NRARTVAGVSICSTMTNRQFHQKLL

SEQ ID NO: 14495 - protein, 25 aa, Artificial Sequence
  Description of Artificial Sequence: Synthetic peptide
RTVAGVSICSTMTNRQFHQKLLKSI

SEQ ID NO: 14496 - protein, 25 aa, Artificial Sequence
  Description of Artificial Sequence: Synthetic peptide
KNRARTVAGVSICSTMTNRQFHQKL

SEQ ID NO: 14497 - protein, 25 aa, Artificial Sequence
  Description of Artificial Sequence: Synthetic peptide
SAKNRARTVAGVSICSTMTNRQFHQ

SEQ ID NO: 14498 - protein, 25 aa, Artificial Sequence
  Description of Artificial Sequence: Synthetic peptide
GHVMVELVAELEGIQYGRSGETLGV

SEQ ID NO: 14499 - protein, 25 aa, Artificial Sequence
  Description of Artificial Sequence: Synthetic peptide
PHGHVMVELVAELEGIQYGRSGETL

SEQ ID NO: 14500 - protein, 25 aa, Artificial Sequence
  Description of Artificial Sequence: Synthetic peptide
RTAPHGHVMVELVAELEGIQYGRSG

SEQ ID NO: 14501 - protein, 25 aa, Artificial Sequence
  Description of Artificial Sequence: Synthetic peptide
HGHVMVELVAELEGIQYGRSGETLG

SEQ ID NO: 14502 - protein, 25 aa, Artificial Sequence
  Description of Artificial Sequence: Synthetic peptide
TAPHGHVMVELVAELEGIQYGRSGE

SEQ ID NO: 14503 - protein, 25 aa, Artificial Sequence
  Description of Artificial Sequence: Synthetic peptide
HVMVELVAELEGIQYGRSGETLGVL

SEQ ID NO: 14504 - protein, 25 aa, Artificial Sequence
  Description of Artificial Sequence: Synthetic peptide
APHGHVMVELVAELEGIQYGRSGET

SEQ ID NO: 14505 - protein, 25 aa, Artificial Sequence
  Description of Artificial Sequence: Synthetic peptide
SHGKQVVSDIDYVPLKSATCITRCN

SEQ ID NO: 14506 - protein, 25 aa, Artificial Sequence
  Description of Artificial Sequence: Synthetic peptide
KQVVSDIDYVPLKSATCITRCNLGG

SEQ ID NO: 14507 - protein, 25 aa, Artificial Sequence
  Description of Artificial Sequence: Synthetic peptide
GKQVVSDIDYVPLKSATCITRCNLG

SEQ ID NO: 14508 - protein, 25 aa, Artificial Sequence
  Description of Artificial Sequence: Synthetic peptide
HGKQVVSDIDYVPLKSATCITRCNL

SEQ ID NO: 14509 - protein, 25 aa, Artificial Sequence
  Description of Artificial Sequence: Synthetic peptide
VVSDIDYVPLKSATCITRCNLGGAV

SEQ ID NO: 14510 - protein, 25 aa, Artificial Sequence
  Description of Artificial Sequence: Synthetic peptide
QVVSDIDYVPLKSATCITRCNLGGA

SEQ ID NO: 14511 - protein, 25 aa, Artificial Sequence
  Description of Artificial Sequence: Synthetic peptide
RFQTLLALHRSYLTPGDSSSGWTAG

SEQ ID NO: 14512 - protein, 25 aa, Artificial Sequence
  Description of Artificial Sequence: Synthetic peptide
FQTLLALHRSYLTPGDSSSGWTAGA

SEQ ID NO: 14513 - protein, 25 aa, Artificial Sequence
  Description of Artificial Sequence: Synthetic peptide
IDKVLNEKCSAYTVELGTEVNEFAC

SEQ ID NO: 14514 - protein, 25 aa, Artificial Sequence
  Description of Artificial Sequence: Synthetic peptide
KVLNEKCSAYTVELGTEVNEFACVV

SEQ ID NO: 14515 - protein, 25 aa, Artificial Sequence
  Description of Artificial Sequence: Synthetic peptide
DKVLNEKCSAYTVELGTEVNEFACV

SEQ ID NO: 14516 - protein, 25 aa, Artificial Sequence
  Description of Artificial Sequence: Synthetic peptide
ERIDKVLNEKCSAYTVELGTEVNEF

SEQ ID NO: 14517 - protein, 25 aa, Artificial Sequence
  Description of Artificial Sequence: Synthetic peptide
DERIDKVLNEKCSAYTVELGTEVNE

SEQ ID NO: 14518 - protein, 25 aa, Artificial Sequence
  Description of Artificial Sequence: Synthetic peptide
VLNEKCSAYTVELGTEVNEFACVVA

SEQ ID NO: 14519 - protein, 25 aa, Artificial Sequence
  Description of Artificial Sequence: Synthetic peptide
RIDKVLNEKCSAYTVELGTEVNEFA

SEQ ID NO: 14520 - protein, 25 aa, Artificial Sequence
  Description of Artificial Sequence: Synthetic peptide
YFTSDYYQLYSTQLSTDTGVEHVTF

SEQ ID NO: 14521 - protein, 25 aa, Artificial Sequence
  Description of Artificial Sequence: Synthetic peptide
LHSYFTSDYYQLYSTQLSTDTGVEH

SEQ ID NO: 14522 - protein, 25 aa, Artificial Sequence
  Description of Artificial Sequence: Synthetic peptide
VVLHSYFTSDYYQLYSTQLSTDTGV

SEQ ID NO: 14523 - protein, 25 aa, Artificial Sequence
  Description of Artificial Sequence: Synthetic peptide
HSYFTSDYYQLYSTQLSTDTGVEHV

SEQ ID NO: 14524 - protein, 25 aa, Artificial Sequence
  Description of Artificial Sequence: Synthetic peptide
SYFTSDYYQLYSTQLSTDTGVEHVT

SEQ ID NO: 14525 - protein, 25 aa, Artificial Sequence
  Description of Artificial Sequence: Synthetic peptide
FTSDYYQLYSTQLSTDTGVEHVTFF

SEQ ID NO: 14526 - protein, 25 aa, Artificial Sequence
  Description of Artificial Sequence: Synthetic peptide
VLHSYFTSDYYQLYSTQLSTDTGVE

SEQ ID NO: 14527 - protein, 25 aa, Artificial Sequence
  Description of Artificial Sequence: Synthetic peptide
ELWAKRNIKPVPEVKILNNLGVDIA

SEQ ID NO: 14528 - protein, 25 aa, Artificial Sequence
  Description of Artificial Sequence: Synthetic peptide
KIQDSLSSTASALGKLQDVVNQNAQ

SEQ ID NO: 14529 - protein, 25 aa, Artificial Sequence
  Description of Artificial Sequence: Synthetic peptide
IGKIQDSLSSTASALGKLQDVVNQN

SEQ ID NO: 14530 - protein, 25 aa, Artificial Sequence
  Description of Artificial Sequence: Synthetic peptide
SAIGKIQDSLSSTASALGKLQDVVN

SEQ ID NO: 14531 - protein, 25 aa, Artificial Sequence
  Description of Artificial Sequence: Synthetic peptide
IQDSLSSTASALGKLQDVVNQNAQA

SEQ ID NO: 14532 - protein, 25 aa, Artificial Sequence
  Description of Artificial Sequence: Synthetic peptide
AIGKIQDSLSSTASALGKLQDVVNQ

SEQ ID NO: 14533 - protein, 25 aa, Artificial Sequence
  Description of Artificial Sequence: Synthetic peptide
GKIQDSLSSTASALGKLQDVVNQNA

SEQ ID NO: 14534 - protein, 25 aa, Artificial Sequence
  Description of Artificial Sequence: Synthetic peptide
AARVVRSIFSRTLETAQNSVRVLQK

SEQ ID NO: 14535 - protein, 25 aa, Artificial Sequence
  Description of Artificial Sequence: Synthetic peptide
NAVVKIYCPACHNSEVGPEHSLAEY

SEQ ID NO: 14536 - protein, 25 aa, Artificial Sequence
  Description of Artificial Sequence: Synthetic peptide
SIIKTIQPRVEKKKLDGFMGRIRSV

SEQ ID NO: 14537 - protein, 25 aa, Artificial Sequence
  Description of Artificial Sequence: Synthetic peptide
YLTSSSKTPEEHFIETISLAGSYKD

SEQ ID NO: 14538 - protein, 25 aa, Artificial Sequence
  Description of Artificial Sequence: Synthetic peptide
GEDIQLLKSAYENFNQHEVLLAPLL

SEQ ID NO: 14539 - protein, 25 aa, Artificial Sequence
  Description of Artificial Sequence: Synthetic peptide
GIFGADPIHSLRVCVDTVRTNVYLA

SEQ ID NO: 14540 - protein, 25 aa, Artificial Sequence
  Description of Artificial Sequence: Synthetic peptide
IFGADPIHSLRVCVDTVRTNVYLAV

SEQ ID NO: 14541 - protein, 25 aa, Artificial Sequence
  Description of Artificial Sequence: Synthetic peptide
YVGYLQPRTFLLKYNENGTITDAVD

SEQ ID NO: 14542 - protein, 25 aa, Artificial Sequence
  Description of Artificial Sequence: Synthetic peptide
GYLQPRTFLLKYNENGTITDAVDCA

SEQ ID NO: 14543 - protein, 25 aa, Artificial Sequence
  Description of Artificial Sequence: Synthetic peptide
YLQPRTFLLKYNENGTITDAVDCAL

SEQ ID NO: 14544 - protein, 25 aa, Artificial Sequence
  Description of Artificial Sequence: Synthetic peptide
VGYLQPRTFLLKYNENGTITDAVDC

SEQ ID NO: 14545 - protein, 25 aa, Artificial Sequence
  Description of Artificial Sequence: Synthetic peptide
YYVGYLQPRTFLLKYNENGTITDAV

SEQ ID NO: 14546 - protein, 25 aa, Artificial Sequence
  Description of Artificial Sequence: Synthetic peptide
LQDLKWARFPKSDGTGTIYTELEPP

SEQ ID NO: 14547 - protein, 25 aa, Artificial Sequence
  Description of Artificial Sequence: Synthetic peptide
AIGLALYYPSARIVYTACSHAAVDA

SEQ ID NO: 14548 - protein, 25 aa, Artificial Sequence
  Description of Artificial Sequence: Synthetic peptide
FQEKDEDDNLIDSYFVVKRHTFSNY

SEQ ID NO: 14549 - protein, 25 aa, Artificial Sequence
  Description of Artificial Sequence: Synthetic peptide
RFQEKDEDDNLIDSYFVVKRHTFSN

SEQ ID NO: 14550 - protein, 25 aa, Artificial Sequence
  Description of Artificial Sequence: Synthetic peptide
LHVVGPNVNKGEDIQLLKSAYENFN

SEQ ID NO: 14551 - protein, 25 aa, Artificial Sequence
  Description of Artificial Sequence: Synthetic peptide
HCLHVVGPNVNKGEDIQLLKSAYEN

SEQ ID NO: 14552 - protein, 25 aa, Artificial Sequence
  Description of Artificial Sequence: Synthetic peptide
CLHVVGPNVNKGEDIQLLKSAYENF

SEQ ID NO: 14553 - protein, 25 aa, Artificial Sequence
  Description of Artificial Sequence: Synthetic peptide
LEPPCRFVTDTPKGPKVKYLYFIKG

SEQ ID NO: 14554 - protein, 25 aa, Artificial Sequence
  Description of Artificial Sequence: Synthetic peptide
YTELEPPCRFVTDTPKGPKVKYLYF

SEQ ID NO: 14555 - protein, 25 aa, Artificial Sequence
  Description of Artificial Sequence: Synthetic peptide
PPCRFVTDTPKGPKVKYLYFIKGLN

SEQ ID NO: 14556 - protein, 25 aa, Artificial Sequence
  Description of Artificial Sequence: Synthetic peptide
ELEPPCRFVTDTPKGPKVKYLYFIK

SEQ ID NO: 14557 - protein, 25 aa, Artificial Sequence
  Description of Artificial Sequence: Synthetic peptide
EPPCRFVTDTPKGPKVKYLYFIKGL

SEQ ID NO: 14558 - protein, 25 aa, Artificial Sequence
  Description of Artificial Sequence: Synthetic peptide
TELEPPCRFVTDTPKGPKVKYLYFI

SEQ ID NO: 14559 - protein, 25 aa, Artificial Sequence
  Description of Artificial Sequence: Synthetic peptide
ECTTIVNGVRRSFYVYANGGKGFCK

SEQ ID NO: 14560 - protein, 25 aa, Artificial Sequence
  Description of Artificial Sequence: Synthetic peptide
CTTIVNGVRRSFYVYANGGKGFCKL

SEQ ID NO: 14561 - protein, 25 aa, Artificial Sequence
  Description of Artificial Sequence: Synthetic peptide
YTERSEKSYELQTPFEIKLAKKFDT

SEQ ID NO: 14562 - protein, 25 aa, Artificial Sequence
  Description of Artificial Sequence: Synthetic peptide
WYTERSEKSYELQTPFEIKLAKKFD

SEQ ID NO: 14563 - protein, 25 aa, Artificial Sequence
  Description of Artificial Sequence: Synthetic peptide
AWYTERSEKSYELQTPFEIKLAKKF

SEQ ID NO: 14564 - protein, 25 aa, Artificial Sequence
  Description of Artificial Sequence: Synthetic peptide
FYTSKTTVASLINTLNDLNETLVTM

SEQ ID NO: 14565 - protein, 25 aa, Artificial Sequence
  Description of Artificial Sequence: Synthetic peptide
SKTTVASLINTLNDLNETLVTMPLG

SEQ ID NO: 14566 - protein, 25 aa, Artificial Sequence
  Description of Artificial Sequence: Synthetic peptide
YTSKTTVASLINTLNDLNETLVTMP

SEQ ID NO: 14567 - protein, 25 aa, Artificial Sequence
  Description of Artificial Sequence: Synthetic peptide
TSKTTVASLINTLNDLNETLVTMPL

SEQ ID NO: 14568 - protein, 25 aa, Artificial Sequence
  Description of Artificial Sequence: Synthetic peptide
KTTVASLINTLNDLNETLVTMPLGY

SEQ ID NO: 14569 - protein, 25 aa, Artificial Sequence
  Description of Artificial Sequence: Synthetic peptide
EHEIAWYTERSEKSYELQTPFEIKL

SEQ ID NO: 14570 - protein, 25 aa, Artificial Sequence
  Description of Artificial Sequence: Synthetic peptide
HEHEIAWYTERSEKSYELQTPFEIK

SEQ ID NO: 14571 - protein, 25 aa, Artificial Sequence
  Description of Artificial Sequence: Synthetic peptide
ARFYFYTSKTTVASLINTLNDLNET

SEQ ID NO: 14572 - protein, 25 aa, Artificial Sequence
  Description of Artificial Sequence: Synthetic peptide
RFYFYTSKTTVASLINTLNDLNETL

SEQ ID NO: 14573 - protein, 25 aa, Artificial Sequence
  Description of Artificial Sequence: Synthetic peptide
FYFYTSKTTVASLINTLNDLNETLV

SEQ ID NO: 14574 - protein, 25 aa, Artificial Sequence
  Description of Artificial Sequence: Synthetic peptide
IIKTIQPRVEKKKLDGFMGRIRSVY

SEQ ID NO: 14575 - protein, 25 aa, Artificial Sequence
  Description of Artificial Sequence: Synthetic peptide
PQLEQPYVFIKRSDARTAPHGHVMV

SEQ ID NO: 14576 - protein, 25 aa, Artificial Sequence
  Description of Artificial Sequence: Synthetic peptide
QLEQPYVFIKRSDARTAPHGHVMVE

SEQ ID NO: 14577 - protein, 25 aa, Artificial Sequence
  Description of Artificial Sequence: Synthetic peptide
LEQPYVFIKRSDARTAPHGHVMVEL

SEQ ID NO: 14578 - protein, 25 aa, Artificial Sequence
  Description of Artificial Sequence: Synthetic peptide
VLPQLEQPYVFIKRSDARTAPHGHV

SEQ ID NO: 14579 - protein, 25 aa, Artificial Sequence
  Description of Artificial Sequence: Synthetic peptide
LPQLEQPYVFIKRSDARTAPHGHVM

SEQ ID NO: 14580 - protein, 25 aa, Artificial Sequence
  Description of Artificial Sequence: Synthetic peptide
NKEMYLKLRSDVLLPLTQYNRYLAL

SEQ ID NO: 14581 - protein, 25 aa, Artificial Sequence
  Description of Artificial Sequence: Synthetic peptide
LNKEMYLKLRSDVLLPLTQYNRYLA

SEQ ID NO: 14582 - protein, 25 aa, Artificial Sequence
  Description of Artificial Sequence: Synthetic peptide
TLVSDIDITFLKKDAPYIVGDVVQE

SEQ ID NO: 14583 - protein, 25 aa, Artificial Sequence
  Description of Artificial Sequence: Synthetic peptide
LVSDIDITFLKKDAPYIVGDVVQEG

SEQ ID NO: 14584 - protein, 25 aa, Artificial Sequence
  Description of Artificial Sequence: Synthetic peptide
VSDIDITFLKKDAPYIVGDVVQEGV

SEQ ID NO: 14585 - protein, 25 aa, Artificial Sequence
  Description of Artificial Sequence: Synthetic peptide
NYLKSPNFSKLINIIIWFLLLSVCL

SEQ ID NO: 14586 - protein, 25 aa, Artificial Sequence
  Description of Artificial Sequence: Synthetic peptide
YLKSPNFSKLINIIIWFLLLSVCLG

SEQ ID NO: 14587 - protein, 25 aa, Artificial Sequence
  Description of Artificial Sequence: Synthetic peptide
SFNYLKSPNFSKLINIIIWFLLLSV

SEQ ID NO: 14588 - protein, 25 aa, Artificial Sequence
  Description of Artificial Sequence: Synthetic peptide
FNYLKSPNFSKLINIIIWFLLLSVC

SEQ ID NO: 14589 - protein, 25 aa, Artificial Sequence
  Description of Artificial Sequence: Synthetic peptide
EVNEFACVVADAVIKTLQPVSELLT

SEQ ID NO: 14590 - protein, 25 aa, Artificial Sequence
  Description of Artificial Sequence: Synthetic peptide
EEAARYMRSLKVPATVSVSSPDAVT

SEQ ID NO: 14591 - protein, 25 aa, Artificial Sequence
  Description of Artificial Sequence: Synthetic peptide
EVEKGVLPQLEQPYVFIKRSDARTA

SEQ ID NO: 14592 - protein, 25 aa, Artificial Sequence
  Description of Artificial Sequence: Synthetic peptide
KKDWYDFVENPDILRVYANLGERVR

SEQ ID NO: 14593 - protein, 25 aa, Artificial Sequence
  Description of Artificial Sequence: Synthetic peptide
KIQEGVVDYGARFYFYTSKTTVASL

SEQ ID NO: 14594 - protein, 25 aa, Artificial Sequence
  Description of Artificial Sequence: Synthetic peptide
IKIQEGVVDYGARFYFYTSKTTVAS

SEQ ID NO: 14595 - protein, 25 aa, Artificial Sequence
  Description of Artificial Sequence: Synthetic peptide
GIKIQEGVVDYGARFYFYTSKTTVA

SEQ ID NO: 14596 - protein, 25 aa, Artificial Sequence
  Description of Artificial Sequence: Synthetic peptide
ELKFNPPALQDAYYRARAGEAANFC

SEQ ID NO: 14597 - protein, 25 aa, Artificial Sequence
  Description of Artificial Sequence: Synthetic peptide
NGTHWFVTQRNFYEPQIITTDNTFV

SEQ ID NO: 14598 - protein, 25 aa, Artificial Sequence
  Description of Artificial Sequence: Synthetic peptide
AIDYKHYTPSFKKGAKLLHKPIVWH

SEQ ID NO: 14599 - protein, 25 aa, Artificial Sequence
  Description of Artificial Sequence: Synthetic peptide
IDYKHYTPSFKKGAKLLHKPIVWHV

SEQ ID NO: 14600 - protein, 25 aa, Artificial Sequence
  Description of Artificial Sequence: Synthetic peptide
DYKHYTPSFKKGAKLLHKPIVWHVN

SEQ ID NO: 14601 - protein, 25 aa, Artificial Sequence
  Description of Artificial Sequence: Synthetic peptide
VAIDYKHYTPSFKKGAKLLHKPIVW

SEQ ID NO: 14602 - protein, 25 aa, Artificial Sequence
  Description of Artificial Sequence: Synthetic peptide
GVFVSNGTHWFVTQRNFYEPQIITT

SEQ ID NO: 14603 - protein, 25 aa, Artificial Sequence
  Description of Artificial Sequence: Synthetic peptide
VFVSNGTHWFVTQRNFYEPQIITTD

SEQ ID NO: 14604 - protein, 25 aa, Artificial Sequence
  Description of Artificial Sequence: Synthetic peptide
IETISLAGSYKDWSYSGQSTQLGIE

SEQ ID NO: 14605 - protein, 25 aa, Artificial Sequence
  Description of Artificial Sequence: Synthetic peptide
ETISLAGSYKDWSYSGQSTQLGIEF

SEQ ID NO: 14606 - protein, 25 aa, Artificial Sequence
  Description of Artificial Sequence: Synthetic peptide
FGGCVFSYVGCHNKCAYWVPRASAN

SEQ ID NO: 14607 - protein, 25 aa, Artificial Sequence
  Description of Artificial Sequence: Synthetic peptide
GGCVFSYVGCHNKCAYWVPRASANI

SEQ ID NO: 14608 - protein, 25 aa, Artificial Sequence
  Description of Artificial Sequence: Synthetic peptide
FSYVGCHNKCAYWVPRASANIGCNH

SEQ ID NO: 14609 - protein, 25 aa, Artificial Sequence
  Description of Artificial Sequence: Synthetic peptide
GCVFSYVGCHNKCAYWVPRASANIG

SEQ ID NO: 14610 - protein, 25 aa, Artificial Sequence
  Description of Artificial Sequence: Synthetic peptide
CVFSYVGCHNKCAYWVPRASANIGC

SEQ ID NO: 14611 - protein, 25 aa, Artificial Sequence
  Description of Artificial Sequence: Synthetic peptide
SYVGCHNKCAYWVPRASANIGCNHT

SEQ ID NO: 14612 - protein, 25 aa, Artificial Sequence
  Description of Artificial Sequence: Synthetic peptide
VFSYVGCHNKCAYWVPRASANIGCN

SEQ ID NO: 14613 - protein, 25 aa, Artificial Sequence
  Description of Artificial Sequence: Synthetic peptide
GICASYQTQTNSPRRARSVASQSII

SEQ ID NO: 14614 - protein, 25 aa, Artificial Sequence
  Description of Artificial Sequence: Synthetic peptide
ICASYQTQTNSPRRARSVASQSIIA

SEQ ID NO: 14615 - protein, 25 aa, Artificial Sequence
  Description of Artificial Sequence: Synthetic peptide
LVRGFGDSVEEVLSEARQHLKDGTC

SEQ ID NO: 14616 - protein, 25 aa, Artificial Sequence
  Description of Artificial Sequence: Synthetic peptide
VRGFGDSVEEVLSEARQHLKDGTCG

SEQ ID NO: 14617 - protein, 25 aa, Artificial Sequence
  Description of Artificial Sequence: Synthetic peptide
ATRVECTTIVNGVRRSFYVYANGGK

SEQ ID NO: 14618 - protein, 25 aa, Artificial Sequence
  Description of Artificial Sequence: Synthetic peptide
TRVECTTIVNGVRRSFYVYANGGKG

SEQ ID NO: 14619 - protein, 25 aa, Artificial Sequence
  Description of Artificial Sequence: Synthetic peptide
VECTTIVNGVRRSFYVYANGGKGFC

SEQ ID NO: 14620 - protein, 25 aa, Artificial Sequence
  Description of Artificial Sequence: Synthetic peptide
RVECTTIVNGVRRSFYVYANGGKGF

SEQ ID NO: 14621 - protein, 25 aa, Artificial Sequence
  Description of Artificial Sequence: Synthetic peptide
RATRVECTTIVNGVRRSFYVYANGG

SEQ ID NO: 14622 - protein, 25 aa, Artificial Sequence
  Description of Artificial Sequence: Synthetic peptide
NRYLALYNKYKYFSGAMDTTSYREA

SEQ ID NO: 14623 - protein, 25 aa, Artificial Sequence
  Description of Artificial Sequence: Synthetic peptide
RYLALYNKYKYFSGAMDTTSYREAA

SEQ ID NO: 14624 - protein, 25 aa, Artificial Sequence
  Description of Artificial Sequence: Synthetic peptide
FRRAFGEYSHVVAFNTLLFLMSFTV

SEQ ID NO: 14625 - protein, 25 aa, Artificial Sequence
  Description of Artificial Sequence: Synthetic peptide
RAFGEYSHVVAFNTLLFLMSFTVLC

SEQ ID NO: 14626 - protein, 25 aa, Artificial Sequence
  Description of Artificial Sequence: Synthetic peptide
AFGEYSHVVAFNTLLFLMSFTVLCL

SEQ ID NO: 14627 - protein, 25 aa, Artificial Sequence
  Description of Artificial Sequence: Synthetic peptide
RRAFGEYSHVVAFNTLLFLMSFTVL

SEQ ID NO: 14628 - protein, 25 aa, Artificial Sequence
  Description of Artificial Sequence: Synthetic peptide
RFRRAFGEYSHVVAFNTLLFLMSFT

SEQ ID NO: 14629 - protein, 25 aa, Artificial Sequence
  Description of Artificial Sequence: Synthetic peptide
TILDGISQYSLRLIDAMMFTSDLAT

SEQ ID NO: 14630 - protein, 25 aa, Artificial Sequence
  Description of Artificial Sequence: Synthetic peptide
ILDGISQYSLRLIDAMMFTSDLATN

SEQ ID NO: 14631 - protein, 25 aa, Artificial Sequence
  Description of Artificial Sequence: Synthetic peptide
SRIKASMPTTIAKNTVKSVGKFCLE

SEQ ID NO: 14632 - protein, 25 aa, Artificial Sequence
  Description of Artificial Sequence: Synthetic peptide
SVLQQLRVESSSKLWAQCVQLHNDI

SEQ ID NO: 14633 - protein, 25 aa, Artificial Sequence
  Description of Artificial Sequence: Synthetic peptide
SEFDRDAAMQRKLEKMADQAMTQMY

SEQ ID NO: 14634 - protein, 25 aa, Artificial Sequence
  Description of Artificial Sequence: Synthetic peptide
KSEFDRDAAMQRKLEKMADQAMTQM

SEQ ID NO: 14635 - protein, 25 aa, Artificial Sequence
  Description of Artificial Sequence: Synthetic peptide
AKSEFDRDAAMQRKLEKMADQAMTQ

SEQ ID NO: 14636 - protein, 25 aa, Artificial Sequence
  Description of Artificial Sequence: Synthetic peptide
VAKSEFDRDAAMQRKLEKMADQAMT

SEQ ID NO: 14637 - protein, 25 aa, Artificial Sequence
  Description of Artificial Sequence: Synthetic peptide
RQCSGVTFQSAVKRTIKGTHHWLLL

SEQ ID NO: 14638 - protein, 25 aa, Artificial Sequence
  Description of Artificial Sequence: Synthetic peptide
HINAQVAKSHNIALIWNVKDFMSLS

SEQ ID NO: 14639 - protein, 25 aa, Artificial Sequence
  Description of Artificial Sequence: Synthetic peptide
RHINAQVAKSHNIALIWNVKDFMSL

SEQ ID NO: 14640 - protein, 25 aa, Artificial Sequence
  Description of Artificial Sequence: Synthetic peptide
MTARTVYDDGARRVWTLMNVLTLVY

SEQ ID NO: 14641 - protein, 25 aa, Artificial Sequence
  Description of Artificial Sequence: Synthetic peptide
GDCLGDIAARDLICAQKFNGLTVLP

SEQ ID NO: 14642 - protein, 25 aa, Artificial Sequence
  Description of Artificial Sequence: Synthetic peptide
MMSAPPAQYELKHGTFTCASEYTGN

SEQ ID NO: 14643 - protein, 25 aa, Artificial Sequence
  Description of Artificial Sequence: Synthetic peptide
PAQYELKHGTFTCASEYTGNYQCGH

SEQ ID NO: 14644 - protein, 25 aa, Artificial Sequence
  Description of Artificial Sequence: Synthetic peptide
MSAPPAQYELKHGTFTCASEYTGNY

SEQ ID NO: 14645 - protein, 25 aa, Artificial Sequence
  Description of Artificial Sequence: Synthetic peptide
APPAQYELKHGTFTCASEYTGNYQC

SEQ ID NO: 14646 - protein, 25 aa, Artificial Sequence
  Description of Artificial Sequence: Synthetic peptide
SAPPAQYELKHGTFTCASEYTGNYQ

SEQ ID NO: 14647 - protein, 25 aa, Artificial Sequence
  Description of Artificial Sequence: Synthetic peptide
AQYELKHGTFTCASEYTGNYQCGHY

SEQ ID NO: 14648 - protein, 25 aa, Artificial Sequence
  Description of Artificial Sequence: Synthetic peptide
PPAQYELKHGTFTCASEYTGNYQCG

SEQ ID NO: 14649 - protein, 25 aa, Artificial Sequence
  Description of Artificial Sequence: Synthetic peptide
LARKHTTCCSLSHRFYRLANECAQV

SEQ ID NO: 14650 - protein, 25 aa, Artificial Sequence
  Description of Artificial Sequence: Synthetic peptide
QPITNCVKMLCTHTGTGQAITVTPE

SEQ ID NO: 14651 - protein, 25 aa, Artificial Sequence
  Description of Artificial Sequence: Synthetic peptide
PITNCVKMLCTHTGTGQAITVTPEA

SEQ ID NO: 14652 - protein, 25 aa, Artificial Sequence
  Description of Artificial Sequence: Synthetic peptide
ITNCVKMLCTHTGTGQAITVTPEAN

SEQ ID NO: 14653 - protein, 25 aa, Artificial Sequence
  Description of Artificial Sequence: Synthetic peptide
NWNTKHSSGVTRELMRELNGGAYTR

SEQ ID NO: 14654 - protein, 25 aa, Artificial Sequence
  Description of Artificial Sequence: Synthetic peptide
VTTTLEETKFLTENLLLYIDINGNL

SEQ ID NO: 14655 - protein, 25 aa, Artificial Sequence
  Description of Artificial Sequence: Synthetic peptide
EVTTTLEETKFLTENLLLYIDINGN

SEQ ID NO: 14656 - protein, 25 aa, Artificial Sequence
  Description of Artificial Sequence: Synthetic peptide
EEKFKEGVEFLRDGWEIVKFISTCA

SEQ ID NO: 14657 - protein, 25 aa, Artificial Sequence
  Description of Artificial Sequence: Synthetic peptide
LEEKFKEGVEFLRDGWEIVKFISTC

SEQ ID NO: 14658 - protein, 25 aa, Artificial Sequence
  Description of Artificial Sequence: Synthetic peptide
WLEEKFKEGVEFLRDGWEIVKFIST

SEQ ID NO: 14659 - protein, 25 aa, Artificial Sequence
  Description of Artificial Sequence: Synthetic peptide
FLQSINFVRIIMRLWLCWKCRSKNP

SEQ ID NO: 14660 - protein, 25 aa, Artificial Sequence
  Description of Artificial Sequence: Synthetic peptide
LQSINFVRIIMRLWLCWKCRSKNPL

SEQ ID NO: 14661 - protein, 25 aa, Artificial Sequence
  Description of Artificial Sequence: Synthetic peptide
GVTRDIASTDTCFANKHADFDTWFS

SEQ ID NO: 14662 - protein, 25 aa, Artificial Sequence
  Description of Artificial Sequence: Synthetic peptide
VTRDIASTDTCFANKHADFDTWFSQ

SEQ ID NO: 14663 - protein, 25 aa, Artificial Sequence
  Description of Artificial Sequence: Synthetic peptide
HWFVTQRNFYEPQIITTDNTFVSGN

SEQ ID NO: 14664 - protein, 25 aa, Artificial Sequence
  Description of Artificial Sequence: Synthetic peptide
EDEFTPFDVVRQCSGVTFQSAVKRT

SEQ ID NO: 14665 - protein, 25 aa, Artificial Sequence
  Description of Artificial Sequence: Synthetic peptide
AIDGGVTRDIASTDTCFANKHADFD

SEQ ID NO: 14666 - protein, 25 aa, Artificial Sequence
  Description of Artificial Sequence: Synthetic peptide
YKAIDGGVTRDIASTDTCFANKHAD

SEQ ID NO: 14667 - protein, 25 aa, Artificial Sequence
  Description of Artificial Sequence: Synthetic peptide
GYKAIDGGVTRDIASTDTCFANKHA

SEQ ID NO: 14668 - protein, 25 aa, Artificial Sequence
  Description of Artificial Sequence: Synthetic peptide
IDGGVTRDIASTDTCFANKHADFDT

SEQ ID NO: 14669 - protein, 25 aa, Artificial Sequence
  Description of Artificial Sequence: Synthetic peptide
KAIDGGVTRDIASTDTCFANKHADF

SEQ ID NO: 14670 - protein, 25 aa, Artificial Sequence
  Description of Artificial Sequence: Synthetic peptide
DGGVTRDIASTDTCFANKHADFDTW

SEQ ID NO: 14671 - protein, 25 aa, Artificial Sequence
  Description of Artificial Sequence: Synthetic peptide
VYFLQSINFVRIIMRLWLCWKCRSK

SEQ ID NO: 14672 - protein, 25 aa, Artificial Sequence
  Description of Artificial Sequence: Synthetic peptide
MTWLDMVDTSLSGFKLKDCVMYASA

SEQ ID NO: 14673 - protein, 25 aa, Artificial Sequence
  Description of Artificial Sequence: Synthetic peptide
IQQVVDADSKIVQLSEISMDNSPNL

SEQ ID NO: 14674 - protein, 25 aa, Artificial Sequence
  Description of Artificial Sequence: Synthetic peptide
EIQQVVDADSKIVQLSEISMDNSPN

SEQ ID NO: 14675 - protein, 25 aa, Artificial Sequence
  Description of Artificial Sequence: Synthetic peptide
TAVVIPTKKAGGTTEMLAKALRKVP

SEQ ID NO: 14676 - protein, 25 aa, Artificial Sequence
  Description of Artificial Sequence: Synthetic peptide
VETKAIVSTIQRKYKGIKIQEGVVD

SEQ ID NO: 14677 - protein, 25 aa, Artificial Sequence
  Description of Artificial Sequence: Synthetic peptide
ETKAIVSTIQRKYKGIKIQEGVVDY

SEQ ID NO: 14678 - protein, 25 aa, Artificial Sequence
  Description of Artificial Sequence: Synthetic peptide
EQKIAEIPKEEVKPFITESKPSVEQ

SEQ ID NO: 14679 - protein, 25 aa, Artificial Sequence
  Description of Artificial Sequence: Synthetic peptide
TFQSAVKRTIKGTHHWLLLTILTSL

SEQ ID NO: 14680 - protein, 25 aa, Artificial Sequence
  Description of Artificial Sequence: Synthetic peptide
QSAVKRTIKGTHHWLLLTILTSLLV

SEQ ID NO: 14681 - protein, 25 aa, Artificial Sequence
  Description of Artificial Sequence: Synthetic peptide
FQSAVKRTIKGTHHWLLLTILTSLL

SEQ ID NO: 14682 - protein, 25 aa, Artificial Sequence
  Description of Artificial Sequence: Synthetic peptide
VTFQSAVKRTIKGTHHWLLLTILTS

SEQ ID NO: 14683 - protein, 25 aa, Artificial Sequence
  Description of Artificial Sequence: Synthetic peptide
GSALLEDEFTPFDVVRQCSGVTFQS

SEQ ID NO: 14684 - protein, 25 aa, Artificial Sequence
  Description of Artificial Sequence: Synthetic peptide
MDTTSYREAACCHLAKALNDFSNSG

SEQ ID NO: 14685 - protein, 25 aa, Artificial Sequence
  Description of Artificial Sequence: Synthetic peptide
AMDTTSYREAACCHLAKALNDFSNS

SEQ ID NO: 14686 - protein, 25 aa, Artificial Sequence
  Description of Artificial Sequence: Synthetic peptide
HGGGVAGALNKATNNAMQVESDDYI

SEQ ID NO: 14687 - protein, 25 aa, Artificial Sequence
  Description of Artificial Sequence: Synthetic peptide
GGGVAGALNKATNNAMQVESDDYIA

SEQ ID NO: 14688 - protein, 25 aa, Artificial Sequence
  Description of Artificial Sequence: Synthetic peptide
YLKHGGGVAGALNKATNNAMQVESD

SEQ ID NO: 14689 - protein, 25 aa, Artificial Sequence
  Description of Artificial Sequence: Synthetic peptide
GVAGALNKATNNAMQVESDDYIATN

SEQ ID NO: 14690 - protein, 25 aa, Artificial Sequence
  Description of Artificial Sequence: Synthetic peptide
VAGALNKATNNAMQVESDDYIATNG

SEQ ID NO: 14691 - protein, 25 aa, Artificial Sequence
  Description of Artificial Sequence: Synthetic peptide
LKHGGGVAGALNKATNNAMQVESDD

SEQ ID NO: 14692 - protein, 25 aa, Artificial Sequence
  Description of Artificial Sequence: Synthetic peptide
KHGGGVAGALNKATNNAMQVESDDY

SEQ ID NO: 14693 - protein, 25 aa, Artificial Sequence
  Description of Artificial Sequence: Synthetic peptide
GGVAGALNKATNNAMQVESDDYIAT

SEQ ID NO: 14694 - protein, 25 aa, Artificial Sequence
  Description of Artificial Sequence: Synthetic peptide
HTKKWKYPQVNGLTSIKWADNNCYL

SEQ ID NO: 14695 - protein, 25 aa, Artificial Sequence
  Description of Artificial Sequence: Synthetic peptide
KSEKQVEQKIAEIPKEEVKPFITES

SEQ ID NO: 14696 - protein, 25 aa, Artificial Sequence
  Description of Artificial Sequence: Synthetic peptide
MKSEKQVEQKIAEIPKEEVKPFITE

SEQ ID NO: 14697 - protein, 25 aa, Artificial Sequence
  Description of Artificial Sequence: Synthetic peptide
EMKSEKQVEQKIAEIPKEEVKPFIT

SEQ ID NO: 14698 - protein, 25 aa, Artificial Sequence
  Description of Artificial Sequence: Synthetic peptide
SEKQVEQKIAEIPKEEVKPFITESK

SEQ ID NO: 14699 - protein, 25 aa, Artificial Sequence
  Description of Artificial Sequence: Synthetic peptide
EKQVEQKIAEIPKEEVKPFITESKP

SEQ ID NO: 14700 - protein, 25 aa, Artificial Sequence
  Description of Artificial Sequence: Synthetic peptide
SFLEMKSEKQVEQKIAEIPKEEVKP

SEQ ID NO: 14701 - protein, 25 aa, Artificial Sequence
  Description of Artificial Sequence: Synthetic peptide
FLEMKSEKQVEQKIAEIPKEEVKPF

SEQ ID NO: 14702 - protein, 25 aa, Artificial Sequence
  Description of Artificial Sequence: Synthetic peptide
LEMKSEKQVEQKIAEIPKEEVKPFI

SEQ ID NO: 14703 - protein, 25 aa, Artificial Sequence
  Description of Artificial Sequence: Synthetic peptide
IGGAKLKALNLGETFVTHSKGLYRK

SEQ ID NO: 14704 - protein, 25 aa, Artificial Sequence
  Description of Artificial Sequence: Synthetic peptide
DSAEVAVKMFDAYVNTFSSTFNVPM

SEQ ID NO: 14705 - protein, 25 aa, Artificial Sequence
  Description of Artificial Sequence: Synthetic peptide
VGDSAEVAVKMFDAYVNTFSSTFNV

SEQ ID NO: 14706 - protein, 25 aa, Artificial Sequence
  Description of Artificial Sequence: Synthetic peptide
GDSAEVAVKMFDAYVNTFSSTFNVP

SEQ ID NO: 14707 - protein, 25 aa, Artificial Sequence
  Description of Artificial Sequence: Synthetic peptide
KGLYRKCVKSREETGLLMPLKAPKE

SEQ ID NO: 14708 - protein, 25 aa, Artificial Sequence
  Description of Artificial Sequence: Synthetic peptide
PSYAAFATAQEAYEQAVANGDSEVV

SEQ ID NO: 14709 - protein, 25 aa, Artificial Sequence
  Description of Artificial Sequence: Synthetic peptide
SKGLYRKCVKSREETGLLMPLKAPK

SEQ ID NO: 14710 - protein, 25 aa, Artificial Sequence
  Description of Artificial Sequence: Synthetic peptide
LGPLSAQTGIAVLDMCASLKELLQN

SEQ ID NO: 14711 - protein, 25 aa, Artificial Sequence
  Description of Artificial Sequence: Synthetic peptide
KKWKYPQVNGLTSIKWADNNCYLAT

SEQ ID NO: 14712 - protein, 25 aa, Artificial Sequence
  Description of Artificial Sequence: Synthetic peptide
TKKWKYPQVNGLTSIKWADNNCYLA

SEQ ID NO: 14713 - protein, 25 aa, Artificial Sequence
  Description of Artificial Sequence: Synthetic peptide
KWKYPQVNGLTSIKWADNNCYLATA

SEQ ID NO: 14714 - protein, 25 aa, Artificial Sequence
  Description of Artificial Sequence: Synthetic peptide
YPQVNGLTSIKWADNNCYLATALLT

SEQ ID NO: 14715 - protein, 25 aa, Artificial Sequence
  Description of Artificial Sequence: Synthetic peptide
WKYPQVNGLTSIKWADNNCYLATAL

SEQ ID NO: 14716 - protein, 25 aa, Artificial Sequence
  Description of Artificial Sequence: Synthetic peptide
KYPQVNGLTSIKWADNNCYLATALL

SEQ ID NO: 14717 - protein, 25 aa, Artificial Sequence
  Description of Artificial Sequence: Synthetic peptide
VCINGLMLLEIKDTEKYCALAPNMM

SEQ ID NO: 14718 - protein, 25 aa, Artificial Sequence
  Description of Artificial Sequence: Synthetic peptide
PVCINGLMLLEIKDTEKYCALAPNM

SEQ ID NO: 14719 - protein, 25 aa, Artificial Sequence
  Description of Artificial Sequence: Synthetic peptide
CINGLMLLEIKDTEKYCALAPNMMV

SEQ ID NO: 14720 - protein, 25 aa, Artificial Sequence
  Description of Artificial Sequence: Synthetic peptide
NEKQEILGTVSWNLREMLAHAEETR

SEQ ID NO: 14721 - protein, 25 aa, Artificial Sequence
  Description of Artificial Sequence: Synthetic peptide
SNEKQEILGTVSWNLREMLAHAEET

SEQ ID NO: 14722 - protein, 25 aa, Artificial Sequence
  Description of Artificial Sequence: Synthetic peptide
YLKLRSDVLLPLTQYNRYLALYNKY

SEQ ID NO: 14723 - protein, 25 aa, Artificial Sequence
  Description of Artificial Sequence: Synthetic peptide
EMYLKLRSDVLLPLTQYNRYLALYN

SEQ ID NO: 14724 - protein, 25 aa, Artificial Sequence
  Description of Artificial Sequence: Synthetic peptide
MYLKLRSDVLLPLTQYNRYLALYNK

SEQ ID NO: 14725 - protein, 25 aa, Artificial Sequence
  Description of Artificial Sequence: Synthetic peptide
AAFATAQEAYEQAVANGDSEVVLKK

SEQ ID NO: 14726 - protein, 25 aa, Artificial Sequence
  Description of Artificial Sequence: Synthetic peptide
AFATAQEAYEQAVANGDSEVVLKKL

SEQ ID NO: 14727 - protein, 25 aa, Artificial Sequence
  Description of Artificial Sequence: Synthetic peptide
YAAFATAQEAYEQAVANGDSEVVLK

SEQ ID NO: 14728 - protein, 25 aa, Artificial Sequence
  Description of Artificial Sequence: Synthetic peptide
GARRVWTLMNVLTLVYKVYYGNALD

SEQ ID NO: 14729 - protein, 25 aa, Artificial Sequence
  Description of Artificial Sequence: Synthetic peptide
DTKRGVYCCREHEHEIAWYTERSEK

SEQ ID NO: 14730 - protein, 25 aa, Artificial Sequence
  Description of Artificial Sequence: Synthetic peptide
ESGEFKLASHMYCSFYPPDEDEEEG

SEQ ID NO: 14731 - protein, 25 aa, Artificial Sequence
  Description of Artificial Sequence: Synthetic peptide
DESGEFKLASHMYCSFYPPDEDEEE

SEQ ID NO: 14732 - protein, 25 aa, Artificial Sequence
  Description of Artificial Sequence: Synthetic peptide
TAQEAYEQAVANGDSEVVLKKLKKS

SEQ ID NO: 14733 - protein, 25 aa, Artificial Sequence
  Description of Artificial Sequence: Synthetic peptide
SSSKLWAQCVQLHNDILLAKDTTEA

SEQ ID NO: 14734 - protein, 25 aa, Artificial Sequence
  Description of Artificial Sequence: Synthetic peptide
IICISTKHFYWFFSNYLKRRVVFNG

SEQ ID NO: 14735 - protein, 25 aa, Artificial Sequence
  Description of Artificial Sequence: Synthetic peptide
TCANDPVGFTLKNTVCTVCGMWKGY

SEQ ID NO: 14736 - protein, 25 aa, Artificial Sequence
  Description of Artificial Sequence: Synthetic peptide
IPTTCANDPVGFTLKNTVCTVCGMW

SEQ ID NO: 14737 - protein, 25 aa, Artificial Sequence
  Description of Artificial Sequence: Synthetic peptide
TTCANDPVGFTLKNTVCTVCGMWKG

SEQ ID NO: 14738 - protein, 25 aa, Artificial Sequence
  Description of Artificial Sequence: Synthetic peptide
PTTCANDPVGFTLKNTVCTVCGMWK

SEQ ID NO: 14739 - protein, 25 aa, Artificial Sequence
  Description of Artificial Sequence: Synthetic peptide
QIPTTCANDPVGFTLKNTVCTVCGM

SEQ ID NO: 14740 - protein, 25 aa, Artificial Sequence
  Description of Artificial Sequence: Synthetic peptide
VQIPTTCANDPVGFTLKNTVCTVCG

SEQ ID NO: 14741 - protein, 25 aa, Artificial Sequence
  Description of Artificial Sequence: Synthetic peptide
FIETISLAGSYKDWSYSGQSTQLGI

SEQ ID NO: 14742 - protein, 25 aa, Artificial Sequence
  Description of Artificial Sequence: Synthetic peptide
LPTEVLTEEVVLKTGDLQPLEQPTS

SEQ ID NO: 14743 - protein, 25 aa, Artificial Sequence
  Description of Artificial Sequence: Synthetic peptide
GLDYKAFKQIVESCGNFKVTKGKAK

SEQ ID NO: 14744 - protein, 25 aa, Artificial Sequence
  Description of Artificial Sequence: Synthetic peptide
LDYKAFKQIVESCGNFKVTKGKAKK

SEQ ID NO: 14745 - protein, 25 aa, Artificial Sequence
  Description of Artificial Sequence: Synthetic peptide
PFLNKVVSTTTNIVTRCLNRVCTNY

SEQ ID NO: 14746 - protein, 25 aa, Artificial Sequence
  Description of Artificial Sequence: Synthetic peptide
KCAYWVPRASANIGCNHTGVVGEGS

SEQ ID NO: 14747 - protein, 25 aa, Artificial Sequence
  Description of Artificial Sequence: Synthetic peptide
CAYWVPRASANIGCNHTGVVGEGSE

SEQ ID NO: 14748 - protein, 25 aa, Artificial Sequence
  Description of Artificial Sequence: Synthetic peptide
SGSDVLYQPPQTSITSAVLQSGFRK

SEQ ID NO: 14749 - protein, 25 aa, Artificial Sequence
  Description of Artificial Sequence: Synthetic peptide
GSDVLYQPPQTSITSAVLQSGFRKM

SEQ ID NO: 14750 - protein, 25 aa, Artificial Sequence
  Description of Artificial Sequence: Synthetic peptide
ALEPLVDLPIGINITRFQTLLALHR

SEQ ID NO: 14751 - protein, 25 aa, Artificial Sequence
  Description of Artificial Sequence: Synthetic peptide
LEPLVDLPIGINITRFQTLLALHRS

SEQ ID NO: 14752 - protein, 25 aa, Artificial Sequence
  Description of Artificial Sequence: Synthetic peptide
NNCTFEYVSQPFLMDLEGKQGNFKN

SEQ ID NO: 14753 - protein, 25 aa, Artificial Sequence
  Description of Artificial Sequence: Synthetic peptide
LPAPRTLLTKGTLEPEYFNSVCRLM

SEQ ID NO: 14754 - protein, 25 aa, Artificial Sequence
  Description of Artificial Sequence: Synthetic peptide
RTLLTKGTLEPEYFNSVCRLMKTIG

SEQ ID NO: 14755 - protein, 25 aa, Artificial Sequence
  Description of Artificial Sequence: Synthetic peptide
PAPRTLLTKGTLEPEYFNSVCRLMK

SEQ ID NO: 14756 - protein, 25 aa, Artificial Sequence
  Description of Artificial Sequence: Synthetic peptide
APRTLLTKGTLEPEYFNSVCRLMKT

SEQ ID NO: 14757 - protein, 25 aa, Artificial Sequence
  Description of Artificial Sequence: Synthetic peptide
CLDDRCILHCANFNVLFSTVFPPTS

SEQ ID NO: 14758 - protein, 25 aa, Artificial Sequence
  Description of Artificial Sequence: Synthetic peptide
NCVNCLDDRCILHCANFNVLFSTVF

SEQ ID NO: 14759 - protein, 25 aa, Artificial Sequence
  Description of Artificial Sequence: Synthetic peptide
CVNCLDDRCILHCANFNVLFSTVFP

SEQ ID NO: 14760 - protein, 25 aa, Artificial Sequence
  Description of Artificial Sequence: Synthetic peptide
NCLDDRCILHCANFNVLFSTVFPPT

SEQ ID NO: 14761 - protein, 25 aa, Artificial Sequence
  Description of Artificial Sequence: Synthetic peptide
VNCLDDRCILHCANFNVLFSTVFPP

SEQ ID NO: 14762 - protein, 25 aa, Artificial Sequence
  Description of Artificial Sequence: Synthetic peptide
FLYLYALVYFLQSINFVRIIMRLWL

SEQ ID NO: 14763 - protein, 25 aa, Artificial Sequence
  Description of Artificial Sequence: Synthetic peptide
PFLYLYALVYFLQSINFVRIIMRLW

SEQ ID NO: 14764 - protein, 25 aa, Artificial Sequence
  Description of Artificial Sequence: Synthetic peptide
NRDVDTDFVNEFYAYLRKHFSMMIL

SEQ ID NO: 14765 - protein, 25 aa, Artificial Sequence
  Description of Artificial Sequence: Synthetic peptide
LYLYALVYFLQSINFVRIIMRLWLC

SEQ ID NO: 14766 - protein, 25 aa, Artificial Sequence
  Description of Artificial Sequence: Synthetic peptide
AGCFVDDIVKTDGTLMIERFVSLAI

SEQ ID NO: 14767 - protein, 25 aa, Artificial Sequence
  Description of Artificial Sequence: Synthetic peptide
GAGCFVDDIVKTDGTLMIERFVSLA

SEQ ID NO: 14768 - protein, 25 aa, Artificial Sequence
  Description of Artificial Sequence: Synthetic peptide
LKSFTVEKGIYQTSNFRVQPTESIV

SEQ ID NO: 14769 - protein, 25 aa, Artificial Sequence
  Description of Artificial Sequence: Synthetic peptide
TLKSFTVEKGIYQTSNFRVQPTESI

SEQ ID NO: 14770 - protein, 25 aa, Artificial Sequence
  Description of Artificial Sequence: Synthetic peptide
AEIRASANLAATKMSECVLGQSKRV

SEQ ID NO: 14771 - protein, 25 aa, Artificial Sequence
  Description of Artificial Sequence: Synthetic peptide
AAEIRASANLAATKMSECVLGQSKR

SEQ ID NO: 14772 - protein, 25 aa, Artificial Sequence
  Description of Artificial Sequence: Synthetic peptide
YGGWHNMLKTVYSDVENPHLMGWDY

SEQ ID NO: 14773 - protein, 25 aa, Artificial Sequence
  Description of Artificial Sequence: Synthetic peptide
KFYGGWHNMLKTVYSDVENPHLMGW

SEQ ID NO: 14774 - protein, 25 aa, Artificial Sequence
  Description of Artificial Sequence: Synthetic peptide
FYGGWHNMLKTVYSDVENPHLMGWD

SEQ ID NO: 14775 - protein, 25 aa, Artificial Sequence
  Description of Artificial Sequence: Synthetic peptide
GGWHNMLKTVYSDVENPHLMGWDYP

SEQ ID NO: 14776 - protein, 25 aa, Artificial Sequence
  Description of Artificial Sequence: Synthetic peptide
SKFYGGWHNMLKTVYSDVENPHLMG

SEQ ID NO: 14777 - protein, 25 aa, Artificial Sequence
  Description of Artificial Sequence: Synthetic peptide
FTRGVYYPDKVFRSSVLHSTQDLFL

SEQ ID NO: 14778 - protein, 25 aa, Artificial Sequence
  Description of Artificial Sequence: Synthetic peptide
SFTRGVYYPDKVFRSSVLHSTQDLF

SEQ ID NO: 14779 - protein, 25 aa, Artificial Sequence
  Description of Artificial Sequence: Synthetic peptide
VLTSHTVMPLSAPTLVPQEHYVRIT

SEQ ID NO: 14780 - protein, 25 aa, Artificial Sequence
  Description of Artificial Sequence: Synthetic peptide
IPYNSVTSSIVITSGDGTTSPISEH

SEQ ID NO: 14781 - protein, 25 aa, Artificial Sequence
  Description of Artificial Sequence: Synthetic peptide
EKALKYLPIDKCSRIIPARARVECF

SEQ ID NO: 14782 - protein, 25 aa, Artificial Sequence
  Description of Artificial Sequence: Synthetic peptide
CVVLHSYFTSDYYQLYSTQLSTDTG

SEQ ID NO: 14783 - protein, 25 aa, Artificial Sequence
  Description of Artificial Sequence: Synthetic peptide
RFDNPVLPFNDGVYFASTEKSNIIR

SEQ ID NO: 14784 - protein, 25 aa, Artificial Sequence
  Description of Artificial Sequence: Synthetic peptide
DCLGDIAARDLICAQKFNGLTVLPP

SEQ ID NO: 14785 - protein, 25 aa, Artificial Sequence
  Description of Artificial Sequence: Synthetic peptide
CLGDIAARDLICAQKFNGLTVLPPL

SEQ ID NO: 14786 - protein, 25 aa, Artificial Sequence
  Description of Artificial Sequence: Synthetic peptide
DYFVLTSHTVMPLSAPTLVPQEHYV

SEQ ID NO: 14787 - protein, 25 aa, Artificial Sequence
  Description of Artificial Sequence: Synthetic peptide
LGDISGINASVVNIQKEIDRLNEVA

SEQ ID NO: 14788 - protein, 25 aa, Artificial Sequence
  Description of Artificial Sequence: Synthetic peptide
DLGDISGINASVVNIQKEIDRLNEV

SEQ ID NO: 14789 - protein, 25 aa, Artificial Sequence
  Description of Artificial Sequence: Synthetic peptide
ILGAGCFVDDIVKTDGTLMIERFVS

SEQ ID NO: 14790 - protein, 25 aa, Artificial Sequence
  Description of Artificial Sequence: Synthetic peptide
LGAGCFVDDIVKTDGTLMIERFVSL

SEQ ID NO: 14791 - protein, 25 aa, Artificial Sequence
  Description of Artificial Sequence: Synthetic peptide
EIKDATPSDFVRATATIPIQASLPF

SEQ ID NO: 14792 - protein, 25 aa, Artificial Sequence
  Description of Artificial Sequence: Synthetic peptide
PFNDGVYFASTEKSNIIRGWIFGTT

SEQ ID NO: 14793 - protein, 25 aa, Artificial Sequence
  Description of Artificial Sequence: Synthetic peptide
FNDGVYFASTEKSNIIRGWIFGTTL

SEQ ID NO: 14794 - protein, 25 aa, Artificial Sequence
  Description of Artificial Sequence: Synthetic peptide
NDGVYFASTEKSNIIRGWIFGTTLD

SEQ ID NO: 14795 - protein, 25 aa, Artificial Sequence
  Description of Artificial Sequence: Synthetic peptide
VTPSGTWLTYTGAIKLDDKDPNFKD

SEQ ID NO: 14796 - protein, 25 aa, Artificial Sequence
  Description of Artificial Sequence: Synthetic peptide
EVTPSGTWLTYTGAIKLDDKDPNFK

SEQ ID NO: 14797 - protein, 25 aa, Artificial Sequence
  Description of Artificial Sequence: Synthetic peptide
SEETGTLIVNSVLLFLAFVVFLLVT

SEQ ID NO: 14798 - protein, 25 aa, Artificial Sequence
  Description of Artificial Sequence: Synthetic peptide
LFDMSKFPLKLRGTAVMSLKEGQIN

SEQ ID NO: 14799 - protein, 25 aa, Artificial Sequence
  Description of Artificial Sequence: Synthetic peptide
GVPVVDSYYSLLMPILTLTRALTAE

SEQ ID NO: 14800 - protein, 25 aa, Artificial Sequence
  Description of Artificial Sequence: Synthetic peptide
TPTWRVYSTGSNVFQTRAGCLIGAE

SEQ ID NO: 14801 - protein, 25 aa, Artificial Sequence
  Description of Artificial Sequence: Synthetic peptide
QLTPTWRVYSTGSNVFQTRAGCLIG

SEQ ID NO: 14802 - protein, 25 aa, Artificial Sequence
  Description of Artificial Sequence: Synthetic peptide
LTPTWRVYSTGSNVFQTRAGCLIGA

SEQ ID NO: 14803 - protein, 25 aa, Artificial Sequence
  Description of Artificial Sequence: Synthetic peptide
ALPETTADIVVFDEISMATNYDLSV

SEQ ID NO: 14804 - protein, 25 aa, Artificial Sequence
  Description of Artificial Sequence: Synthetic peptide
NALPETTADIVVFDEISMATNYDLS

SEQ ID NO: 14805 - protein, 25 aa, Artificial Sequence
  Description of Artificial Sequence: Synthetic peptide
LPETTADIVVFDEISMATNYDLSVV

SEQ ID NO: 14806 - protein, 25 aa, Artificial Sequence
  Description of Artificial Sequence: Synthetic peptide
YYSLLMPILTLTRALTAESHVDTDL

SEQ ID NO: 14807 - protein, 25 aa, Artificial Sequence
  Description of Artificial Sequence: Synthetic peptide
SLLMPILTLTRALTAESHVDTDLTK

SEQ ID NO: 14808 - protein, 25 aa, Artificial Sequence
  Description of Artificial Sequence: Synthetic peptide
YSLLMPILTLTRALTAESHVDTDLT

SEQ ID NO: 14809 - protein, 25 aa, Artificial Sequence
  Description of Artificial Sequence: Synthetic peptide
SYYSLLMPILTLTRALTAESHVDTD

SEQ ID NO: 14810 - protein, 25 aa, Artificial Sequence
  Description of Artificial Sequence: Synthetic peptide
LMPILTLTRALTAESHVDTDLTKPY

SEQ ID NO: 14811 - protein, 25 aa, Artificial Sequence
  Description of Artificial Sequence: Synthetic peptide
LLMPILTLTRALTAESHVDTDLTKP

SEQ ID NO: 14812 - protein, 25 aa, Artificial Sequence
  Description of Artificial Sequence: Synthetic peptide
TVSALVYDNKLKAHKDKSAQCFKMF

SEQ ID NO: 14813 - protein, 25 aa, Artificial Sequence
  Description of Artificial Sequence: Synthetic peptide
DYILANTCTERLKLFAAETLKATEE

SEQ ID NO: 14814 - protein, 25 aa, Artificial Sequence
  Description of Artificial Sequence: Synthetic peptide
YILANTCTERLKLFAAETLKATEET

SEQ ID NO: 14815 - protein, 25 aa, Artificial Sequence
  Description of Artificial Sequence: Synthetic peptide
DDFVEIIKSQDLSVVSKVVKVTIDY

SEQ ID NO: 14816 - protein, 25 aa, Artificial Sequence
  Description of Artificial Sequence: Synthetic peptide
ARMAGNGGDAALALLLLDRLNQLES

SEQ ID NO: 14817 - protein, 25 aa, Artificial Sequence
  Description of Artificial Sequence: Synthetic peptide
SYGIATVREVLSDRELHLSWEVGKP

SEQ ID NO: 14818 - protein, 25 aa, Artificial Sequence
  Description of Artificial Sequence: Synthetic peptide
LSYGIATVREVLSDRELHLSWEVGK

SEQ ID NO: 14819 - protein, 25 aa, Artificial Sequence
  Description of Artificial Sequence: Synthetic peptide
PSRILGAGCFVDDIVKTDGTLMIER

SEQ ID NO: 14820 - protein, 25 aa, Artificial Sequence
  Description of Artificial Sequence: Synthetic peptide
GEVFNATRFASVYAWNRKRISNCVA

SEQ ID NO: 14821 - protein, 25 aa, Artificial Sequence
  Description of Artificial Sequence: Synthetic peptide
NDPFLGVYYHKNNKSWMESEFRVYS

SEQ ID NO: 14822 - protein, 25 aa, Artificial Sequence
  Description of Artificial Sequence: Synthetic peptide
CNDPFLGVYYHKNNKSWMESEFRVY

SEQ ID NO: 14823 - protein, 25 aa, Artificial Sequence
  Description of Artificial Sequence: Synthetic peptide
QFCNDPFLGVYYHKNNKSWMESEFR

SEQ ID NO: 14824 - protein, 25 aa, Artificial Sequence
  Description of Artificial Sequence: Synthetic peptide
FCNDPFLGVYYHKNNKSWMESEFRV

SEQ ID NO: 14825 - protein, 25 aa, Artificial Sequence
  Description of Artificial Sequence: Synthetic peptide
RLQSLENVAFNVVNKGHFDGQQGEV

SEQ ID NO: 14826 - protein, 25 aa, Artificial Sequence
  Description of Artificial Sequence: Synthetic peptide
KPVPEVKILNNLGVDIAANTVIWDY

SEQ ID NO: 14827 - protein, 25 aa, Artificial Sequence
  Description of Artificial Sequence: Synthetic peptide
ISGINASVVNIQKEIDRLNEVAKNL

SEQ ID NO: 14828 - protein, 25 aa, Artificial Sequence
  Description of Artificial Sequence: Synthetic peptide
LTGHMLDMYSVMLTNDNTSRYWEPE

SEQ ID NO: 14829 - protein, 25 aa, Artificial Sequence
  Description of Artificial Sequence: Synthetic peptide
GHMLDMYSVMLTNDNTSRYWEPEFY

SEQ ID NO: 14830 - protein, 25 aa, Artificial Sequence
  Description of Artificial Sequence: Synthetic peptide
TGHMLDMYSVMLTNDNTSRYWEPEF

SEQ ID NO: 14831 - protein, 25 aa, Artificial Sequence
  Description of Artificial Sequence: Synthetic peptide
TPINLVRDLPQGFSALEPLVDLPIG

SEQ ID NO: 14832 - protein, 25 aa, Artificial Sequence
  Description of Artificial Sequence: Synthetic peptide
FPLKLRGTAVMSLKEGQINDMILSL

SEQ ID NO: 14833 - protein, 25 aa, Artificial Sequence
  Description of Artificial Sequence: Synthetic peptide
KFPLKLRGTAVMSLKEGQINDMILS

SEQ ID NO: 14834 - protein, 25 aa, Artificial Sequence
  Description of Artificial Sequence: Synthetic peptide
DKFKVNSTLEQYVFCTVNALPETTA

SEQ ID NO: 14835 - protein, 25 aa, Artificial Sequence
  Description of Artificial Sequence: Synthetic peptide
PVVDSYYSLLMPILTLTRALTAESH

SEQ ID NO: 14836 - protein, 25 aa, Artificial Sequence
  Description of Artificial Sequence: Synthetic peptide
VPVVDSYYSLLMPILTLTRALTAES

SEQ ID NO: 14837 - protein, 25 aa, Artificial Sequence
  Description of Artificial Sequence: Synthetic peptide
IDGYFKIYSKHTPINLVRDLPQGFS

SEQ ID NO: 14838 - protein, 25 aa, Artificial Sequence
  Description of Artificial Sequence: Synthetic peptide
NNTVYDPLQPELDSFKEELDKYFKN

SEQ ID NO: 14839 - protein, 25 aa, Artificial Sequence
  Description of Artificial Sequence: Synthetic peptide
NTVYDPLQPELDSFKEELDKYFKNH

SEQ ID NO: 14840 - protein, 25 aa, Artificial Sequence
  Description of Artificial Sequence: Synthetic peptide
YSFVSEETGTLIVNSVLLFLAFVVF

SEQ ID NO: 14841 - protein, 25 aa, Artificial Sequence
  Description of Artificial Sequence: Synthetic peptide
FSVAALTNNVAFQTVKPGNFNKDFY

SEQ ID NO: 14842 - protein, 25 aa, Artificial Sequence
  Description of Artificial Sequence: Synthetic peptide
IMRTFKVSIWNLDYIINLIIKNLSK

SEQ ID NO: 14843 - protein, 25 aa, Artificial Sequence
  Description of Artificial Sequence: Synthetic peptide
RKHFSMMILSDDAVVCFNSTYASQG

SEQ ID NO: 14844 - protein, 25 aa, Artificial Sequence
  Description of Artificial Sequence: Synthetic peptide
KHFSMMILSDDAVVCFNSTYASQGL

SEQ ID NO: 14845 - protein, 25 aa, Artificial Sequence
  Description of Artificial Sequence: Synthetic peptide
ALPQRQKKQQTVTLLPAADLDDFSK

SEQ ID NO: 14846 - protein, 25 aa, Artificial Sequence
  Description of Artificial Sequence: Synthetic peptide
LPQRQKKQQTVTLLPAADLDDFSKQ

SEQ ID NO: 14847 - protein, 25 aa, Artificial Sequence
  Description of Artificial Sequence: Synthetic peptide
QRQKKQQTVTLLPAADLDDFSKQLQ

SEQ ID NO: 14848 - protein, 25 aa, Artificial Sequence
  Description of Artificial Sequence: Synthetic peptide
PQRQKKQQTVTLLPAADLDDFSKQL

SEQ ID NO: 14849 - protein, 25 aa, Artificial Sequence
  Description of Artificial Sequence: Synthetic peptide
IPIGAGICASYQTQTNSPRRARSVA

SEQ ID NO: 14850 - protein, 25 aa, Artificial Sequence
  Description of Artificial Sequence: Synthetic peptide
DIPIGAGICASYQTQTNSPRRARSV

SEQ ID NO: 14851 - protein, 25 aa, Artificial Sequence
  Description of Artificial Sequence: Synthetic peptide
LALSKGVHFVCNLLLLFVTVYSHLL

SEQ ID NO: 14852 - protein, 25 aa, Artificial Sequence
  Description of Artificial Sequence: Synthetic peptide
SKGVHFVCNLLLLFVTVYSHLLLVA

SEQ ID NO: 14853 - protein, 25 aa, Artificial Sequence
  Description of Artificial Sequence: Synthetic peptide
LSKGVHFVCNLLLLFVTVYSHLLLV

SEQ ID NO: 14854 - protein, 25 aa, Artificial Sequence
  Description of Artificial Sequence: Synthetic peptide
ADKYVRNLQHRLYECLYRNRDVDTD

SEQ ID NO: 14855 - protein, 25 aa, Artificial Sequence
  Description of Artificial Sequence: Synthetic peptide
REEAIRHVRAWIGFDVEGCHATREA

SEQ ID NO: 14856 - protein, 25 aa, Artificial Sequence
  Description of Artificial Sequence: Synthetic peptide
VTQQLIRAAEIRASANLAATKMSEC

SEQ ID NO: 14857 - protein, 25 aa, Artificial Sequence
  Description of Artificial Sequence: Synthetic peptide
NFYEPQIITTDNTFVSGNCDVVIGI

SEQ ID NO: 14858 - protein, 25 aa, Artificial Sequence
  Description of Artificial Sequence: Synthetic peptide
YEPQIITTDNTFVSGNCDVVIGIVN

SEQ ID NO: 14859 - protein, 25 aa, Artificial Sequence
  Description of Artificial Sequence: Synthetic peptide
EPQIITTDNTFVSGNCDVVIGIVNN

SEQ ID NO: 14860 - protein, 25 aa, Artificial Sequence
  Description of Artificial Sequence: Synthetic peptide
FYEPQIITTDNTFVSGNCDVVIGIV

SEQ ID NO: 14861 - protein, 25 aa, Artificial Sequence
  Description of Artificial Sequence: Synthetic peptide
RNFYEPQIITTDNTFVSGNCDVVIG

SEQ ID NO: 14862 - protein, 25 aa, Artificial Sequence
  Description of Artificial Sequence: Synthetic peptide
VQPTESIVRFPNITNLCPFGEVFNA

SEQ ID NO: 14863 - protein, 25 aa, Artificial Sequence
  Description of Artificial Sequence: Synthetic peptide
RVQPTESIVRFPNITNLCPFGEVFN

SEQ ID NO: 14864 - protein, 25 aa, Artificial Sequence
  Description of Artificial Sequence: Synthetic peptide
ALSKGVHFVCNLLLLFVTVYSHLLL

SEQ ID NO: 14865 - protein, 25 aa, Artificial Sequence
  Description of Artificial Sequence: Synthetic peptide
VTLADAGFIKQYGDCLGDIAARDLI

SEQ ID NO: 14866 - protein, 25 aa, Artificial Sequence
  Description of Artificial Sequence: Synthetic peptide
KVTLADAGFIKQYGDCLGDIAARDL

SEQ ID NO: 14867 - protein, 25 aa, Artificial Sequence
  Description of Artificial Sequence: Synthetic peptide
NKVTLADAGFIKQYGDCLGDIAARD

SEQ ID NO: 14868 - protein, 25 aa, Artificial Sequence
  Description of Artificial Sequence: Synthetic peptide
FNKVTLADAGFIKQYGDCLGDIAAR

SEQ ID NO: 14869 - protein, 25 aa, Artificial Sequence
  Description of Artificial Sequence: Synthetic peptide
SNFGAISSVLNDILSRLDKVEAEVQ

SEQ ID NO: 14870 - protein, 25 aa, Artificial Sequence
  Description of Artificial Sequence: Synthetic peptide
NFGAISSVLNDILSRLDKVEAEVQI

SEQ ID NO: 14871 - protein, 25 aa, Artificial Sequence
  Description of Artificial Sequence: Synthetic peptide
FGAISSVLNDILSRLDKVEAEVQID

SEQ ID NO: 14872 - protein, 25 aa, Artificial Sequence
  Description of Artificial Sequence: Synthetic peptide
LEDFIPMDSTVKNYFITDAQTGSSK

SEQ ID NO: 14873 - protein, 25 aa, Artificial Sequence
  Description of Artificial Sequence: Synthetic peptide
EDFIPMDSTVKNYFITDAQTGSSKC

SEQ ID NO: 14874 - protein, 25 aa, Artificial Sequence
  Description of Artificial Sequence: Synthetic peptide
HKNNKSWMESEFRVYSSANNCTFEY

SEQ ID NO: 14875 - protein, 25 aa, Artificial Sequence
  Description of Artificial Sequence: Synthetic peptide
FGDFIQTTPGSGVPVVDSYYSLLMP

SEQ ID NO: 14876 - protein, 25 aa, Artificial Sequence
  Description of Artificial Sequence: Synthetic peptide
IAQFAPSASAFFGMSRIGMEVTPSG

SEQ ID NO: 14877 - protein, 25 aa, Artificial Sequence
  Description of Artificial Sequence: Synthetic peptide
APSASAFFGMSRIGMEVTPSGTWLT

SEQ ID NO: 14878 - protein, 25 aa, Artificial Sequence
  Description of Artificial Sequence: Synthetic peptide
AQFAPSASAFFGMSRIGMEVTPSGT

SEQ ID NO: 14879 - protein, 25 aa, Artificial Sequence
  Description of Artificial Sequence: Synthetic peptide
QIAQFAPSASAFFGMSRIGMEVTPS

SEQ ID NO: 14880 - protein, 25 aa, Artificial Sequence
  Description of Artificial Sequence: Synthetic peptide
QFAPSASAFFGMSRIGMEVTPSGTW

SEQ ID NO: 14881 - protein, 25 aa, Artificial Sequence
  Description of Artificial Sequence: Synthetic peptide
FAPSASAFFGMSRIGMEVTPSGTWL

SEQ ID NO: 14882 - protein, 25 aa, Artificial Sequence
  Description of Artificial Sequence: Synthetic peptide
NVTWFHAIHVSGTNGTKRFDNPVLP

SEQ ID NO: 14883 - protein, 25 aa, Artificial Sequence
  Description of Artificial Sequence: Synthetic peptide
TDGNKIADKYVRNLQHRLYECLYRN

SEQ ID NO: 14884 - protein, 25 aa, Artificial Sequence
  Description of Artificial Sequence: Synthetic peptide
GAGICASYQTQTNSPRRARSVASQS

SEQ ID NO: 14885 - protein, 25 aa, Artificial Sequence
  Description of Artificial Sequence: Synthetic peptide
AGICASYQTQTNSPRRARSVASQSI

SEQ ID NO: 14886 - protein, 25 aa, Artificial Sequence
  Description of Artificial Sequence: Synthetic peptide
SNGTITVEELKKLLEQWNLVIGFLF

SEQ ID NO: 14887 - protein, 25 aa, Artificial Sequence
  Description of Artificial Sequence: Synthetic peptide
ENPDILRVYANLGERVRQALLKTVQ

SEQ ID NO: 14888 - protein, 25 aa, Artificial Sequence
  Description of Artificial Sequence: Synthetic peptide
SLSHRFYRLANECAQVLSEMVMCGG

SEQ ID NO: 14889 - protein, 25 aa, Artificial Sequence
  Description of Artificial Sequence: Synthetic peptide
LSHRFYRLANECAQVLSEMVMCGGS

SEQ ID NO: 14890 - protein, 25 aa, Artificial Sequence
  Description of Artificial Sequence: Synthetic peptide
QTVTLLPAADLDDFSKQLQQSMSSA

SEQ ID NO: 14891 - protein, 25 aa, Artificial Sequence
  Description of Artificial Sequence: Synthetic peptide
IRVGARKSAPLIELCVDEAGSKSPI

SEQ ID NO: 14892 - protein, 25 aa, Artificial Sequence
  Description of Artificial Sequence: Synthetic peptide
YIRVGARKSAPLIELCVDEAGSKSP

SEQ ID NO: 14893 - protein, 25 aa, Artificial Sequence
  Description of Artificial Sequence: Synthetic peptide
RVGARKSAPLIELCVDEAGSKSPIQ

SEQ ID NO: 14894 - protein, 25 aa, Artificial Sequence
  Description of Artificial Sequence: Synthetic peptide
VGARKSAPLIELCVDEAGSKSPIQY

SEQ ID NO: 14895 - protein, 25 aa, Artificial Sequence
  Description of Artificial Sequence: Synthetic peptide
WYIRVGARKSAPLIELCVDEAGSKS

SEQ ID NO: 14896 - protein, 25 aa, Artificial Sequence
  Description of Artificial Sequence: Synthetic peptide
SARIVYTACSHAAVDALCEKALKYL

SEQ ID NO: 14897 - protein, 25 aa, Artificial Sequence
  Description of Artificial Sequence: Synthetic peptide
AMPNLYKMQRMLLEKCDLQNYGDSA

SEQ ID NO: 14898 - protein, 25 aa, Artificial Sequence
  Description of Artificial Sequence: Synthetic peptide
LAFVVFLLVTLAILTALRLCAYCCN

SEQ ID NO: 14899 - protein, 25 aa, Artificial Sequence
  Description of Artificial Sequence: Synthetic peptide
AFVVFLLVTLAILTALRLCAYCCNI

SEQ ID NO: 14900 - protein, 25 aa, Artificial Sequence
  Description of Artificial Sequence: Synthetic peptide
FVVFLLVTLAILTALRLCAYCCNIV

SEQ ID NO: 14901 - protein, 25 aa, Artificial Sequence
  Description of Artificial Sequence: Synthetic peptide
QHEETIYNLLKDCPAVAKHDFFKFR

SEQ ID NO: 14902 - protein, 25 aa, Artificial Sequence
  Description of Artificial Sequence: Synthetic peptide
KIITLKKRWQLALSKGVHFVCNLLL

SEQ ID NO: 14903 - protein, 25 aa, Artificial Sequence
  Description of Artificial Sequence: Synthetic peptide
ATNYDLSVVNARLRAKHYVYIGDPA

SEQ ID NO: 14904 - protein, 25 aa, Artificial Sequence
  Description of Artificial Sequence: Synthetic peptide
ISAKNRARTVAGVSICSTMTNRQFH

SEQ ID NO: 14905 - protein, 25 aa, Artificial Sequence
  Description of Artificial Sequence: Synthetic peptide
TLKKRWQLALSKGVHFVCNLLLLFV

SEQ ID NO: 14906 - protein, 25 aa, Artificial Sequence
  Description of Artificial Sequence: Synthetic peptide
KFKVNSTLEQYVFCTVNALPETTAD

SEQ ID NO: 14907 - protein, 25 aa, Artificial Sequence
  Description of Artificial Sequence: Synthetic peptide
VNSTLEQYVFCTVNALPETTADIVV

SEQ ID NO: 14908 - protein, 25 aa, Artificial Sequence
  Description of Artificial Sequence: Synthetic peptide
FKVNSTLEQYVFCTVNALPETTADI

SEQ ID NO: 14909 - protein, 25 aa, Artificial Sequence
  Description of Artificial Sequence: Synthetic peptide
STLEQYVFCTVNALPETTADIVVFD

SEQ ID NO: 14910 - protein, 25 aa, Artificial Sequence
  Description of Artificial Sequence: Synthetic peptide
NSTLEQYVFCTVNALPETTADIVVF

SEQ ID NO: 14911 - protein, 25 aa, Artificial Sequence
  Description of Artificial Sequence: Synthetic peptide
KVNSTLEQYVFCTVNALPETTADIV

SEQ ID NO: 14912 - protein, 25 aa, Artificial Sequence
  Description of Artificial Sequence: Synthetic peptide
TLEQYVFCTVNALPETTADIVVFDE

SEQ ID NO: 14913 - protein, 25 aa, Artificial Sequence
  Description of Artificial Sequence: Synthetic peptide
VTQRNFYEPQIITTDNTFVSGNCDV

SEQ ID NO: 14914 - protein, 25 aa, Artificial Sequence
  Description of Artificial Sequence: Synthetic peptide
MILSDDAVVCFNSTYASQGLVASIK

SEQ ID NO: 14915 - protein, 25 aa, Artificial Sequence
  Description of Artificial Sequence: Synthetic peptide
MMILSDDAVVCFNSTYASQGLVASI

SEQ ID NO: 14916 - protein, 25 aa, Artificial Sequence
  Description of Artificial Sequence: Synthetic peptide
ILSDDAVVCFNSTYASQGLVASIKN

SEQ ID NO: 14917 - protein, 25 aa, Artificial Sequence
  Description of Artificial Sequence: Synthetic peptide
SMMILSDDAVVCFNSTYASQGLVAS

SEQ ID NO: 14918 - protein, 25 aa, Artificial Sequence
  Description of Artificial Sequence: Synthetic peptide
LSLLSKGRLIIRENNRVVISSDVLV

SEQ ID NO: 14919 - protein, 25 aa, Artificial Sequence
  Description of Artificial Sequence: Synthetic peptide
LLSKGRLIIRENNRVVISSDVLVNN

SEQ ID NO: 14920 - protein, 25 aa, Artificial Sequence
  Description of Artificial Sequence: Synthetic peptide
MILSLLSKGRLIIRENNRVVISSDV

SEQ ID NO: 14921 - protein, 25 aa, Artificial Sequence
  Description of Artificial Sequence: Synthetic peptide
SLLSKGRLIIRENNRVVISSDVLVN

SEQ ID NO: 14922 - protein, 25 aa, Artificial Sequence
  Description of Artificial Sequence: Synthetic peptide
ILSLLSKGRLIIRENNRVVISSDVL

SEQ ID NO: 14923 - protein, 25 aa, Artificial Sequence
  Description of Artificial Sequence: Synthetic peptide
GLMWLSYFIASFRLFARTRSMWSFN

SEQ ID NO: 14924 - protein, 25 aa, Artificial Sequence
  Description of Artificial Sequence: Synthetic peptide
TRFASVYAWNRKRISNCVADYSVLY

SEQ ID NO: 14925 - protein, 25 aa, Artificial Sequence
  Description of Artificial Sequence: Synthetic peptide
PQGLPNNTASWFTALTQHGKEDLKF

SEQ ID NO: 14926 - protein, 25 aa, Artificial Sequence
  Description of Artificial Sequence: Synthetic peptide
RRPQGLPNNTASWFTALTQHGKEDL

SEQ ID NO: 14927 - protein, 25 aa, Artificial Sequence
  Description of Artificial Sequence: Synthetic peptide
RPQGLPNNTASWFTALTQHGKEDLK

SEQ ID NO: 14928 - protein, 25 aa, Artificial Sequence
  Description of Artificial Sequence: Synthetic peptide
QRRPQGLPNNTASWFTALTQHGKED

SEQ ID NO: 14929 - protein, 25 aa, Artificial Sequence
  Description of Artificial Sequence: Synthetic peptide
HFVCNLLLLFVTVYSHLLLVAAGLE

SEQ ID NO: 14930 - protein, 25 aa, Artificial Sequence
  Description of Artificial Sequence: Synthetic peptide
VHFVCNLLLLFVTVYSHLLLVAAGL

SEQ ID NO: 14931 - protein, 25 aa, Artificial Sequence
  Description of Artificial Sequence: Synthetic peptide
VNQNAQALNTLVKQLSSNFGAISSV

SEQ ID NO: 14932 - protein, 25 aa, Artificial Sequence
  Description of Artificial Sequence: Synthetic peptide
NQNAQALNTLVKQLSSNFGAISSVL

SEQ ID NO: 14933 - protein, 25 aa, Artificial Sequence
  Description of Artificial Sequence: Synthetic peptide
VDTDFVNEFYAYLRKHFSMMILSDD

SEQ ID NO: 14934 - protein, 25 aa, Artificial Sequence
  Description of Artificial Sequence: Synthetic peptide
DVDTDFVNEFYAYLRKHFSMMILSD

SEQ ID NO: 14935 - protein, 25 aa, Artificial Sequence
  Description of Artificial Sequence: Synthetic peptide
LLLQYGSFCTQLNRALTGIAVEQDK

SEQ ID NO: 14936 - protein, 25 aa, Artificial Sequence
  Description of Artificial Sequence: Synthetic peptide
HTFSNYQHEETIYNLLKDCPAVAKH

SEQ ID NO: 14937 - protein, 25 aa, Artificial Sequence
  Description of Artificial Sequence: Synthetic peptide
VPVAIHADQLTPTWRVYSTGSNVFQ

SEQ ID NO: 14938 - protein, 25 aa, Artificial Sequence
  Description of Artificial Sequence: Synthetic peptide
LVYFLQSINFVRIIMRLWLCWKCRS

SEQ ID NO: 14939 - protein, 25 aa, Artificial Sequence
  Description of Artificial Sequence: Synthetic peptide
VLARKHTTCCSLSHRFYRLANECAQ

SEQ ID NO: 14940 - protein, 25 aa, Artificial Sequence
  Description of Artificial Sequence: Synthetic peptide
WFVTQRNFYEPQIITTDNTFVSGNC

SEQ ID NO: 14941 - protein, 25 aa, Artificial Sequence
  Description of Artificial Sequence: Synthetic peptide
LPAADLDDFSKQLQQSMSSADSTQA

SEQ ID NO: 14942 - protein, 25 aa, Artificial Sequence
  Description of Artificial Sequence: Synthetic peptide
PNQEYADVFHLYLQYIRKLHDELTG

SEQ ID NO: 14943 - protein, 25 aa, Artificial Sequence
  Description of Artificial Sequence: Synthetic peptide
EDQDALFAYTKRNVIPTITQMNLKY

SEQ ID NO: 14944 - protein, 25 aa, Artificial Sequence
  Description of Artificial Sequence: Synthetic peptide
LWAKRNIKPVPEVKILNNLGVDIAA

SEQ ID NO: 14945 - protein, 25 aa, Artificial Sequence
  Description of Artificial Sequence: Synthetic peptide
HAIHVSGTNGTKRFDNPVLPFNDGV

SEQ ID NO: 14946 - protein, 25 aa, Artificial Sequence
  Description of Artificial Sequence: Synthetic peptide
FHAIHVSGTNGTKRFDNPVLPFNDG

SEQ ID NO: 14947 - protein, 25 aa, Artificial Sequence
  Description of Artificial Sequence: Synthetic peptide
IDSYFVVKRHTFSNYQHEETIYNLL

SEQ ID NO: 14948 - protein, 25 aa, Artificial Sequence
  Description of Artificial Sequence: Synthetic peptide
VSNGTHWFVTQRNFYEPQIITTDNT

SEQ ID NO: 14949 - protein, 25 aa, Artificial Sequence
  Description of Artificial Sequence: Synthetic peptide
SNGTHWFVTQRNFYEPQIITTDNTF

SEQ ID NO: 14950 - protein, 25 aa, Artificial Sequence
  Description of Artificial Sequence: Synthetic peptide
FVSNGTHWFVTQRNFYEPQIITTDN

SEQ ID NO: 14951 - protein, 25 aa, Artificial Sequence
  Description of Artificial Sequence: Synthetic peptide
LPGCDGGSLYVNKHAFHTPAFDKSA

SEQ ID NO: 14952 - protein, 25 aa, Artificial Sequence
  Description of Artificial Sequence: Synthetic peptide
GCDGGSLYVNKHAFHTPAFDKSAFV

SEQ ID NO: 14953 - protein, 25 aa, Artificial Sequence
  Description of Artificial Sequence: Synthetic peptide
LNLPGCDGGSLYVNKHAFHTPAFDK

SEQ ID NO: 14954 - protein, 25 aa, Artificial Sequence
  Description of Artificial Sequence: Synthetic peptide
NLNLPGCDGGSLYVNKHAFHTPAFD

SEQ ID NO: 14955 - protein, 25 aa, Artificial Sequence
  Description of Artificial Sequence: Synthetic peptide
PGCDGGSLYVNKHAFHTPAFDKSAF

SEQ ID NO: 14956 - protein, 25 aa, Artificial Sequence
  Description of Artificial Sequence: Synthetic peptide
NLPGCDGGSLYVNKHAFHTPAFDKS

SEQ ID NO: 14957 - protein, 25 aa, Artificial Sequence
  Description of Artificial Sequence: Synthetic peptide
GTHWFVTQRNFYEPQIITTDNTFVS

SEQ ID NO: 14958 - protein, 25 aa, Artificial Sequence
  Description of Artificial Sequence: Synthetic peptide
SPFELEDFIPMDSTVKNYFITDAQT

SEQ ID NO: 14959 - protein, 25 aa, Artificial Sequence
  Description of Artificial Sequence: Synthetic peptide
RFKESPFELEDFIPMDSTVKNYFIT

SEQ ID NO: 14960 - protein, 25 aa, Artificial Sequence
  Description of Artificial Sequence: Synthetic peptide
FKESPFELEDFIPMDSTVKNYFITD

SEQ ID NO: 14961 - protein, 25 aa, Artificial Sequence
  Description of Artificial Sequence: Synthetic peptide
ESPFELEDFIPMDSTVKNYFITDAQ

SEQ ID NO: 14962 - protein, 25 aa, Artificial Sequence
  Description of Artificial Sequence: Synthetic peptide
KESPFELEDFIPMDSTVKNYFITDA

SEQ ID NO: 14963 - protein, 25 aa, Artificial Sequence
  Description of Artificial Sequence: Synthetic peptide
GLAKRFKESPFELEDFIPMDSTVKN

SEQ ID NO: 14964 - protein, 25 aa, Artificial Sequence
  Description of Artificial Sequence: Synthetic peptide
NLCPFGEVFNATRFASVYAWNRKRI

SEQ ID NO: 14965 - protein, 25 aa, Artificial Sequence
  Description of Artificial Sequence: Synthetic peptide
TNLCPFGEVFNATRFASVYAWNRKR

SEQ ID NO: 14966 - protein, 25 aa, Artificial Sequence
  Description of Artificial Sequence: Synthetic peptide
LCPFGEVFNATRFASVYAWNRKRIS

SEQ ID NO: 14967 - protein, 25 aa, Artificial Sequence
  Description of Artificial Sequence: Synthetic peptide
FTRLQSLENVAFNVVNKGHFDGQQG

SEQ ID NO: 14968 - protein, 25 aa, Artificial Sequence
  Description of Artificial Sequence: Synthetic peptide
TSIKWADNNCYLATALLTLQQIELK

SEQ ID NO: 14969 - protein, 25 aa, Artificial Sequence
  Description of Artificial Sequence: Synthetic peptide
LTSIKWADNNCYLATALLTLQQIEL

SEQ ID NO: 14970 - protein, 25 aa, Artificial Sequence
  Description of Artificial Sequence: Synthetic peptide
GLTSIKWADNNCYLATALLTLQQIE

SEQ ID NO: 14971 - protein, 25 aa, Artificial Sequence
  Description of Artificial Sequence: Synthetic peptide
LKSEDAQGMDNLACEDLKPVSEEVV

SEQ ID NO: 14972 - protein, 25 aa, Artificial Sequence
  Description of Artificial Sequence: Synthetic peptide
YLYALVYFLQSINFVRIIMRLWLCW

SEQ ID NO: 14973 - protein, 25 aa, Artificial Sequence
  Description of Artificial Sequence: Synthetic peptide
GCFVDDIVKTDGTLMIERFVSLAID

SEQ ID NO: 14974 - protein, 25 aa, Artificial Sequence
  Description of Artificial Sequence: Synthetic peptide
RAAEIRASANLAATKMSECVLGQSK

SEQ ID NO: 14975 - protein, 25 aa, Artificial Sequence
  Description of Artificial Sequence: Synthetic peptide
IRAAEIRASANLAATKMSECVLGQS

SEQ ID NO: 14976 - protein, 25 aa, Artificial Sequence
  Description of Artificial Sequence: Synthetic peptide
FDNPVLPFNDGVYFASTEKSNIIRG

SEQ ID NO: 14977 - protein, 25 aa, Artificial Sequence
  Description of Artificial Sequence: Synthetic peptide
TRGVYYPDKVFRSSVLHSTQDLFLP

SEQ ID NO: 14978 - protein, 25 aa, Artificial Sequence
  Description of Artificial Sequence: Synthetic peptide
YYPDKVFRSSVLHSTQDLFLPFFSN

SEQ ID NO: 14979 - protein, 25 aa, Artificial Sequence
  Description of Artificial Sequence: Synthetic peptide
RGVYYPDKVFRSSVLHSTQDLFLPF

SEQ ID NO: 14980 - protein, 25 aa, Artificial Sequence
  Description of Artificial Sequence: Synthetic peptide
GVYYPDKVFRSSVLHSTQDLFLPFF

SEQ ID NO: 14981 - protein, 25 aa, Artificial Sequence
  Description of Artificial Sequence: Synthetic peptide
VYYPDKVFRSSVLHSTQDLFLPFFS

SEQ ID NO: 14982 - protein, 25 aa, Artificial Sequence
  Description of Artificial Sequence: Synthetic peptide
YPDKVFRSSVLHSTQDLFLPFFSNV

SEQ ID NO: 14983 - protein, 25 aa, Artificial Sequence
  Description of Artificial Sequence: Synthetic peptide
NYLKRRVVFNGVSFSTFEEAALCTF

SEQ ID NO: 14984 - protein, 25 aa, Artificial Sequence
  Description of Artificial Sequence: Synthetic peptide
SNYLKRRVVFNGVSFSTFEEAALCT

SEQ ID NO: 14985 - protein, 25 aa, Artificial Sequence
  Description of Artificial Sequence: Synthetic peptide
LKRRVVFNGVSFSTFEEAALCTFLL

SEQ ID NO: 14986 - protein, 25 aa, Artificial Sequence
  Description of Artificial Sequence: Synthetic peptide
YLKRRVVFNGVSFSTFEEAALCTFL

SEQ ID NO: 14987 - protein, 25 aa, Artificial Sequence
  Description of Artificial Sequence: Synthetic peptide
GVVQLTSQWLTNIFGTVYEKLKPVL

SEQ ID NO: 14988 - protein, 25 aa, Artificial Sequence
  Description of Artificial Sequence: Synthetic peptide
YALVYFLQSINFVRIIMRLWLCWKC

SEQ ID NO: 14989 - protein, 25 aa, Artificial Sequence
  Description of Artificial Sequence: Synthetic peptide
KELLVYAADPAMHAASGNLLLDKRT

SEQ ID NO: 14990 - protein, 25 aa, Artificial Sequence
  Description of Artificial Sequence: Synthetic peptide
PSKLIEYTDFATSACVLAAECTIFK

SEQ ID NO: 14991 - protein, 25 aa, Artificial Sequence
  Description of Artificial Sequence: Synthetic peptide
YFVLTSHTVMPLSAPTLVPQEHYVR

SEQ ID NO: 14992 - protein, 25 aa, Artificial Sequence
  Description of Artificial Sequence: Synthetic peptide
FVLTSHTVMPLSAPTLVPQEHYVRI

SEQ ID NO: 14993 - protein, 25 aa, Artificial Sequence
  Description of Artificial Sequence: Synthetic peptide
GDAALALLLLDRLNQLESKMSGKGQ

SEQ ID NO: 14994 - protein, 25 aa, Artificial Sequence
  Description of Artificial Sequence: Synthetic peptide
ALCEKALKYLPIDKCSRIIPARARV

SEQ ID NO: 14995 - protein, 25 aa, Artificial Sequence
  Description of Artificial Sequence: Synthetic peptide
DALCEKALKYLPIDKCSRIIPARAR

SEQ ID NO: 14996 - protein, 25 aa, Artificial Sequence
  Description of Artificial Sequence: Synthetic peptide
AKSASVYYSQLMCQPILLLDQALVS

SEQ ID NO: 14997 - protein, 25 aa, Artificial Sequence
  Description of Artificial Sequence: Synthetic peptide
SASVYYSQLMCQPILLLDQALVSDV

SEQ ID NO: 14998 - protein, 25 aa, Artificial Sequence
  Description of Artificial Sequence: Synthetic peptide
ASVYYSQLMCQPILLLDQALVSDVG

SEQ ID NO: 14999 - protein, 25 aa, Artificial Sequence
  Description of Artificial Sequence: Synthetic peptide
KSASVYYSQLMCQPILLLDQALVSD

SEQ ID NO: 15000 - protein, 25 aa, Artificial Sequence
  Description of Artificial Sequence: Synthetic peptide
KALKYLPIDKCSRIIPARARVECFD

SEQ ID NO: 15001 - protein, 25 aa, Artificial Sequence
  Description of Artificial Sequence: Synthetic peptide
VVTTVMFLARGIVFMCVEYCPIFFI

SEQ ID NO: 15002 - protein, 25 aa, Artificial Sequence
  Description of Artificial Sequence: Synthetic peptide
GVVTTVMFLARGIVFMCVEYCPIFF

SEQ ID NO: 15003 - protein, 25 aa, Artificial Sequence
  Description of Artificial Sequence: Synthetic peptide
TVMFLARGIVFMCVEYCPIFFITGN

SEQ ID NO: 15004 - protein, 25 aa, Artificial Sequence
  Description of Artificial Sequence: Synthetic peptide
VMFLARGIVFMCVEYCPIFFITGNT

SEQ ID NO: 15005 - protein, 25 aa, Artificial Sequence
  Description of Artificial Sequence: Synthetic peptide
VTTVMFLARGIVFMCVEYCPIFFIT

SEQ ID NO: 15006 - protein, 25 aa, Artificial Sequence
  Description of Artificial Sequence: Synthetic peptide
TTVMFLARGIVFMCVEYCPIFFITG

SEQ ID NO: 15007 - protein, 25 aa, Artificial Sequence
  Description of Artificial Sequence: Synthetic peptide
TEEVGHTDLMAAYVDNSSLTIKKPN

SEQ ID NO: 15008 - protein, 25 aa, Artificial Sequence
  Description of Artificial Sequence: Synthetic peptide
EVGHTDLMAAYVDNSSLTIKKPNEL

SEQ ID NO: 15009 - protein, 25 aa, Artificial Sequence
  Description of Artificial Sequence: Synthetic peptide
EEVGHTDLMAAYVDNSSLTIKKPNE

SEQ ID NO: 15010 - protein, 25 aa, Artificial Sequence
  Description of Artificial Sequence: Synthetic peptide
VGHTDLMAAYVDNSSLTIKKPNELS

SEQ ID NO: 15011 - protein, 25 aa, Artificial Sequence
  Description of Artificial Sequence: Synthetic peptide
IMQLFFSYFAVHFISNSWLMWLIIN

SEQ ID NO: 15012 - protein, 25 aa, Artificial Sequence
  Description of Artificial Sequence: Synthetic peptide
VEEVTTTLEETKFLTENLLLYIDIN

SEQ ID NO: 15013 - protein, 25 aa, Artificial Sequence
  Description of Artificial Sequence: Synthetic peptide
RGIVFMCVEYCPIFFITGNTLQCIM

SEQ ID NO: 15014 - protein, 25 aa, Artificial Sequence
  Description of Artificial Sequence: Synthetic peptide
GIVFMCVEYCPIFFITGNTLQCIML

SEQ ID NO: 15015 - protein, 25 aa, Artificial Sequence
  Description of Artificial Sequence: Synthetic peptide
FLARGIVFMCVEYCPIFFITGNTLQ

SEQ ID NO: 15016 - protein, 25 aa, Artificial Sequence
  Description of Artificial Sequence: Synthetic peptide
LARGIVFMCVEYCPIFFITGNTLQC

SEQ ID NO: 15017 - protein, 25 aa, Artificial Sequence
  Description of Artificial Sequence: Synthetic peptide
KRAKVTSAMQTMLFTMLRKLDNDAL

SEQ ID NO: 15018 - protein, 25 aa, Artificial Sequence
  Description of Artificial Sequence: Synthetic peptide
KGIYQTSNFRVQPTESIVRFPNITN

SEQ ID NO: 15019 - protein, 25 aa, Artificial Sequence
  Description of Artificial Sequence: Synthetic peptide
IYQTSNFRVQPTESIVRFPNITNLC

SEQ ID NO: 15020 - protein, 25 aa, Artificial Sequence
  Description of Artificial Sequence: Synthetic peptide
YQTSNFRVQPTESIVRFPNITNLCP

SEQ ID NO: 15021 - protein, 25 aa, Artificial Sequence
  Description of Artificial Sequence: Synthetic peptide
GIYQTSNFRVQPTESIVRFPNITNL

SEQ ID NO: 15022 - protein, 25 aa, Artificial Sequence
  Description of Artificial Sequence: Synthetic peptide
VTALRANSAVKLQNNELSPVALRQM

SEQ ID NO: 15023 - protein, 25 aa, Artificial Sequence
  Description of Artificial Sequence: Synthetic peptide
AVHFISNSWLMWLIINLVQMAPISA

SEQ ID NO: 15024 - protein, 25 aa, Artificial Sequence
  Description of Artificial Sequence: Synthetic peptide
TFYLTNDVSFLAHIQWMVMFTPLVP

SEQ ID NO: 15025 - protein, 25 aa, Artificial Sequence
  Description of Artificial Sequence: Synthetic peptide
DPSRILGAGCFVDDIVKTDGTLMIE

SEQ ID NO: 15026 - protein, 25 aa, Artificial Sequence
  Description of Artificial Sequence: Synthetic peptide
EPEYFNSVCRLMKTIGPDMFLGTCR

SEQ ID NO: 15027 - protein, 25 aa, Artificial Sequence
  Description of Artificial Sequence: Synthetic peptide
LEPEYFNSVCRLMKTIGPDMFLGTC

SEQ ID NO: 15028 - protein, 25 aa, Artificial Sequence
  Description of Artificial Sequence: Synthetic peptide
SEDKRAKVTSAMQTMLFTMLRKLDN

SEQ ID NO: 15029 - protein, 25 aa, Artificial Sequence
  Description of Artificial Sequence: Synthetic peptide
GTCRRCPAEIVDTVSALVYDNKLKA

SEQ ID NO: 15030 - protein, 25 aa, Artificial Sequence
  Description of Artificial Sequence: Synthetic peptide
LGTCRRCPAEIVDTVSALVYDNKLK

SEQ ID NO: 15031 - protein, 25 aa, Artificial Sequence
  Description of Artificial Sequence: Synthetic peptide
TCRRCPAEIVDTVSALVYDNKLKAH

SEQ ID NO: 15032 - protein, 25 aa, Artificial Sequence
  Description of Artificial Sequence: Synthetic peptide
CRRCPAEIVDTVSALVYDNKLKAHK

SEQ ID NO: 15033 - protein, 25 aa, Artificial Sequence
  Description of Artificial Sequence: Synthetic peptide
YDYCIPYNSVTSSIVITSGDGTTSP

SEQ ID NO: 15034 - protein, 25 aa, Artificial Sequence
  Description of Artificial Sequence: Synthetic peptide
NCYDYCIPYNSVTSSIVITSGDGTT

SEQ ID NO: 15035 - protein, 25 aa, Artificial Sequence
  Description of Artificial Sequence: Synthetic peptide
CYDYCIPYNSVTSSIVITSGDGTTS

SEQ ID NO: 15036 - protein, 25 aa, Artificial Sequence
  Description of Artificial Sequence: Synthetic peptide
DYCIPYNSVTSSIVITSGDGTTSPI

SEQ ID NO: 15037 - protein, 25 aa, Artificial Sequence
  Description of Artificial Sequence: Synthetic peptide
TNCYDYCIPYNSVTSSIVITSGDGT

SEQ ID NO: 15038 - protein, 25 aa, Artificial Sequence
  Description of Artificial Sequence: Synthetic peptide
YCIPYNSVTSSIVITSGDGTTSPIS

SEQ ID NO: 15039 - protein, 25 aa, Artificial Sequence
  Description of Artificial Sequence: Synthetic peptide
IQKEIDRLNEVAKNLNESLIDLQEL

SEQ ID NO: 15040 - protein, 25 aa, Artificial Sequence
  Description of Artificial Sequence: Synthetic peptide
QKEIDRLNEVAKNLNESLIDLQELG

SEQ ID NO: 15041 - protein, 25 aa, Artificial Sequence
  Description of Artificial Sequence: Synthetic peptide
NIQKEIDRLNEVAKNLNESLIDLQE

SEQ ID NO: 15042 - protein, 25 aa, Artificial Sequence
  Description of Artificial Sequence: Synthetic peptide
KDATPSDFVRATATIPIQASLPFGW

SEQ ID NO: 15043 - protein, 25 aa, Artificial Sequence
  Description of Artificial Sequence: Synthetic peptide
IKDATPSDFVRATATIPIQASLPFG

SEQ ID NO: 15044 - protein, 25 aa, Artificial Sequence
  Description of Artificial Sequence: Synthetic peptide
DATPSDFVRATATIPIQASLPFGWL

SEQ ID NO: 15045 - protein, 25 aa, Artificial Sequence
  Description of Artificial Sequence: Synthetic peptide
DPAMHAASGNLLLDKRTTCFSVAAL

SEQ ID NO: 15046 - protein, 25 aa, Artificial Sequence
  Description of Artificial Sequence: Synthetic peptide
AADPAMHAASGNLLLDKRTTCFSVA

SEQ ID NO: 15047 - protein, 25 aa, Artificial Sequence
  Description of Artificial Sequence: Synthetic peptide
ADPAMHAASGNLLLDKRTTCFSVAA

SEQ ID NO: 15048 - protein, 25 aa, Artificial Sequence
  Description of Artificial Sequence: Synthetic peptide
ADQLTPTWRVYSTGSNVFQTRAGCL

SEQ ID NO: 15049 - protein, 25 aa, Artificial Sequence
  Description of Artificial Sequence: Synthetic peptide
DQLTPTWRVYSTGSNVFQTRAGCLI

SEQ ID NO: 15050 - protein, 25 aa, Artificial Sequence
  Description of Artificial Sequence: Synthetic peptide
MSKFPLKLRGTAVMSLKEGQINDMI

SEQ ID NO: 15051 - protein, 25 aa, Artificial Sequence
  Description of Artificial Sequence: Synthetic peptide
FDMSKFPLKLRGTAVMSLKEGQIND

SEQ ID NO: 15052 - protein, 25 aa, Artificial Sequence
  Description of Artificial Sequence: Synthetic peptide
DMSKFPLKLRGTAVMSLKEGQINDM

SEQ ID NO: 15053 - protein, 25 aa, Artificial Sequence
  Description of Artificial Sequence: Synthetic peptide
SKFPLKLRGTAVMSLKEGQINDMIL

SEQ ID NO: 15054 - protein, 25 aa, Artificial Sequence
  Description of Artificial Sequence: Synthetic peptide
VSEETGTLIVNSVLLFLAFVVFLLV

SEQ ID NO: 15055 - protein, 25 aa, Artificial Sequence
  Description of Artificial Sequence: Synthetic peptide
FVSEETGTLIVNSVLLFLAFVVFLL

SEQ ID NO: 15056 - protein, 25 aa, Artificial Sequence
  Description of Artificial Sequence: Synthetic peptide
SFVSEETGTLIVNSVLLFLAFVVFL

SEQ ID NO: 15057 - protein, 25 aa, Artificial Sequence
  Description of Artificial Sequence: Synthetic peptide
TDLTKGPHEFCSQHTMLVKQGDDYV

SEQ ID NO: 15058 - protein, 25 aa, Artificial Sequence
  Description of Artificial Sequence: Synthetic peptide
TKGPHEFCSQHTMLVKQGDDYVYLP

SEQ ID NO: 15059 - protein, 25 aa, Artificial Sequence
  Description of Artificial Sequence: Synthetic peptide
DLTKGPHEFCSQHTMLVKQGDDYVY

SEQ ID NO: 15060 - protein, 25 aa, Artificial Sequence
  Description of Artificial Sequence: Synthetic peptide
ETDLTKGPHEFCSQHTMLVKQGDDY

SEQ ID NO: 15061 - protein, 25 aa, Artificial Sequence
  Description of Artificial Sequence: Synthetic peptide
LTKGPHEFCSQHTMLVKQGDDYVYL

SEQ ID NO: 15062 - protein, 25 aa, Artificial Sequence
  Description of Artificial Sequence: Synthetic peptide
LWVYKQFDTYNLWNTFTRLQSLENV

SEQ ID NO: 15063 - protein, 25 aa, Artificial Sequence
  Description of Artificial Sequence: Synthetic peptide
YVTQQLIRAAEIRASANLAATKMSE

SEQ ID NO: 15064 - protein, 25 aa, Artificial Sequence
  Description of Artificial Sequence: Synthetic peptide
LQTYVTQQLIRAAEIRASANLAATK

SEQ ID NO: 15065 - protein, 25 aa, Artificial Sequence
  Description of Artificial Sequence: Synthetic peptide
TYVTQQLIRAAEIRASANLAATKMS

SEQ ID NO: 15066 - protein, 25 aa, Artificial Sequence
  Description of Artificial Sequence: Synthetic peptide
QTYVTQQLIRAAEIRASANLAATKM

SEQ ID NO: 15067 - protein, 25 aa, Artificial Sequence
  Description of Artificial Sequence: Synthetic peptide
AGLPYGANKDGIIWVATEGALNTPK

SEQ ID NO: 15068 - protein, 25 aa, Artificial Sequence
  Description of Artificial Sequence: Synthetic peptide
YSLRLIDAMMFTSDLATNNLVVMAY

SEQ ID NO: 15069 - protein, 25 aa, Artificial Sequence
  Description of Artificial Sequence: Synthetic peptide
QYSLRLIDAMMFTSDLATNNLVVMA

SEQ ID NO: 15070 - protein, 25 aa, Artificial Sequence
  Description of Artificial Sequence: Synthetic peptide
LLVYAADPAMHAASGNLLLDKRTTC

SEQ ID NO: 15071 - protein, 25 aa, Artificial Sequence
  Description of Artificial Sequence: Synthetic peptide
LVYAADPAMHAASGNLLLDKRTTCF

SEQ ID NO: 15072 - protein, 25 aa, Artificial Sequence
  Description of Artificial Sequence: Synthetic peptide
DTVSALVYDNKLKAHKDKSAQCFKM

SEQ ID NO: 15073 - protein, 25 aa, Artificial Sequence
  Description of Artificial Sequence: Synthetic peptide
VHVVDGCNSSTCMMCYKRNRATRVE

SEQ ID NO: 15074 - protein, 25 aa, Artificial Sequence
  Description of Artificial Sequence: Synthetic peptide
LATNNLVVMAYITGGVVQLTSQWLT

SEQ ID NO: 15075 - protein, 25 aa, Artificial Sequence
  Description of Artificial Sequence: Synthetic peptide
TRLQSLENVAFNVVNKGHFDGQQGE

SEQ ID NO: 15076 - protein, 25 aa, Artificial Sequence
  Description of Artificial Sequence: Synthetic peptide
YGIATVREVLSDRELHLSWEVGKPR

SEQ ID NO: 15077 - protein, 25 aa, Artificial Sequence
  Description of Artificial Sequence: Synthetic peptide
GIATVREVLSDRELHLSWEVGKPRP

SEQ ID NO: 15078 - protein, 25 aa, Artificial Sequence
  Description of Artificial Sequence: Synthetic peptide
IATVREVLSDRELHLSWEVGKPRPP

SEQ ID NO: 15079 - protein, 25 aa, Artificial Sequence
  Description of Artificial Sequence: Synthetic peptide
LDDFVEIIKSQDLSVVSKVVKVTID

SEQ ID NO: 15080 - protein, 25 aa, Artificial Sequence
  Description of Artificial Sequence: Synthetic peptide
PANSTVLSFCAFAVDAAKAYKDYLA

SEQ ID NO: 15081 - protein, 25 aa, Artificial Sequence
  Description of Artificial Sequence: Synthetic peptide
CTERLKLFAAETLKATEETFKLSYG

SEQ ID NO: 15082 - protein, 25 aa, Artificial Sequence
  Description of Artificial Sequence: Synthetic peptide
TCTERLKLFAAETLKATEETFKLSY

SEQ ID NO: 15083 - protein, 25 aa, Artificial Sequence
  Description of Artificial Sequence: Synthetic peptide
VGGNYNYLYRLFRKSNLKPFERDIS

SEQ ID NO: 15084 - protein, 25 aa, Artificial Sequence
  Description of Artificial Sequence: Synthetic peptide
SKVGGNYNYLYRLFRKSNLKPFERD

SEQ ID NO: 15085 - protein, 25 aa, Artificial Sequence
  Description of Artificial Sequence: Synthetic peptide
DSKVGGNYNYLYRLFRKSNLKPFER

SEQ ID NO: 15086 - protein, 25 aa, Artificial Sequence
  Description of Artificial Sequence: Synthetic peptide
LDSKVGGNYNYLYRLFRKSNLKPFE

SEQ ID NO: 15087 - protein, 25 aa, Artificial Sequence
  Description of Artificial Sequence: Synthetic peptide
KVGGNYNYLYRLFRKSNLKPFERDI

SEQ ID NO: 15088 - protein, 25 aa, Artificial Sequence
  Description of Artificial Sequence: Synthetic peptide
NLDSKVGGNYNYLYRLFRKSNLKPF

SEQ ID NO: 15089 - protein, 25 aa, Artificial Sequence
  Description of Artificial Sequence: Synthetic peptide
PLYAFASEAARVVRSIFSRTLETAQ

SEQ ID NO: 15090 - protein, 25 aa, Artificial Sequence
  Description of Artificial Sequence: Synthetic peptide
LGSLAATVRLQAGNATEVPANSTVL

SEQ ID NO: 15091 - protein, 25 aa, Artificial Sequence
  Description of Artificial Sequence: Synthetic peptide
IQRKYKGIKIQEGVVDYGARFYFYT

SEQ ID NO: 15092 - protein, 25 aa, Artificial Sequence
  Description of Artificial Sequence: Synthetic peptide
KSVYYTSNPTTFHLDGEVITFDNLK

SEQ ID NO: 15093 - protein, 25 aa, Artificial Sequence
  Description of Artificial Sequence: Synthetic peptide
VRTIKVFTTVDNINLHTQVVDMSMT

SEQ ID NO: 15094 - protein, 25 aa, Artificial Sequence
  Description of Artificial Sequence: Synthetic peptide
DQVILLNKHIDAYKTFPPTEPKKDK

SEQ ID NO: 15095 - protein, 25 aa, Artificial Sequence
  Description of Artificial Sequence: Synthetic peptide
NALLSTDGNKIADKYVRNLQHRLYE

SEQ ID NO: 15096 - protein, 25 aa, Artificial Sequence
  Description of Artificial Sequence: Synthetic peptide
ARDGCVPLNIIPLTTAAKLMVVIPD

SEQ ID NO: 15097 - protein, 25 aa, Artificial Sequence
  Description of Artificial Sequence: Synthetic peptide
PLTTAAKLMVVIPDYNTYKNTCDGT

SEQ ID NO: 15098 - protein, 25 aa, Artificial Sequence
  Description of Artificial Sequence: Synthetic peptide
TFLKKDAPYIVGDVVQEGVLTAVVI

SEQ ID NO: 15099 - protein, 25 aa, Artificial Sequence
  Description of Artificial Sequence: Synthetic peptide
ITFLKKDAPYIVGDVVQEGVLTAVV

SEQ ID NO: 15100 - protein, 25 aa, Artificial Sequence
  Description of Artificial Sequence: Synthetic peptide
LKKDAPYIVGDVVQEGVLTAVVIPT

SEQ ID NO: 15101 - protein, 25 aa, Artificial Sequence
  Description of Artificial Sequence: Synthetic peptide
KKDAPYIVGDVVQEGVLTAVVIPTK

SEQ ID NO: 15102 - protein, 25 aa, Artificial Sequence
  Description of Artificial Sequence: Synthetic peptide
LTENLLLYIDINGNLHPDSATLVSD

SEQ ID NO: 15103 - protein, 25 aa, Artificial Sequence
  Description of Artificial Sequence: Synthetic peptide
FLTENLLLYIDINGNLHPDSATLVS

SEQ ID NO: 15104 - protein, 25 aa, Artificial Sequence
  Description of Artificial Sequence: Synthetic peptide
GKPVPYCYDTNVLEGSVAYESLRPD

SEQ ID NO: 15105 - protein, 25 aa, Artificial Sequence
  Description of Artificial Sequence: Synthetic peptide
LNSIIKTIQPRVEKKKLDGFMGRIR

SEQ ID NO: 15106 - protein, 25 aa, Artificial Sequence
  Description of Artificial Sequence: Synthetic peptide
LGRCDIKDLPKEITVATSRTLSYYK

SEQ ID NO: 15107 - protein, 25 aa, Artificial Sequence
  Description of Artificial Sequence: Synthetic peptide
KRGDKSVYYTSNPTTFHLDGEVITF

SEQ ID NO: 15108 - protein, 25 aa, Artificial Sequence
  Description of Artificial Sequence: Synthetic peptide
LKRGDKSVYYTSNPTTFHLDGEVIT

SEQ ID NO: 15109 - protein, 25 aa, Artificial Sequence
  Description of Artificial Sequence: Synthetic peptide
GSFCTQLNRALTGIAVEQDKNTQEV

SEQ ID NO: 15110 - protein, 25 aa, Artificial Sequence
  Description of Artificial Sequence: Synthetic peptide
QYGSFCTQLNRALTGIAVEQDKNTQ

SEQ ID NO: 15111 - protein, 25 aa, Artificial Sequence
  Description of Artificial Sequence: Synthetic peptide
YGSFCTQLNRALTGIAVEQDKNTQE

SEQ ID NO: 15112 - protein, 25 aa, Artificial Sequence
  Description of Artificial Sequence: Synthetic peptide
TYNLWNTFTRLQSLENVAFNVVNKG

SEQ ID NO: 15113 - protein, 25 aa, Artificial Sequence
  Description of Artificial Sequence: Synthetic peptide
VTSNYSGVVTTVMFLARGIVFMCVE

SEQ ID NO: 15114 - protein, 25 aa, Artificial Sequence
  Description of Artificial Sequence: Synthetic peptide
ANKDGIIWVATEGALNTPKDHIGTR

SEQ ID NO: 15115 - protein, 25 aa, Artificial Sequence
  Description of Artificial Sequence: Synthetic peptide
HFSMMILSDDAVVCFNSTYASQGLV

SEQ ID NO: 15116 - protein, 25 aa, Artificial Sequence
  Description of Artificial Sequence: Synthetic peptide
FSMMILSDDAVVCFNSTYASQGLVA

SEQ ID NO: 15117 - protein, 25 aa, Artificial Sequence
  Description of Artificial Sequence: Synthetic peptide
TREEAIRHVRAWIGFDVEGCHATRE

SEQ ID NO: 15118 - protein, 25 aa, Artificial Sequence
  Description of Artificial Sequence: Synthetic peptide
QTSNFRVQPTESIVRFPNITNLCPF

SEQ ID NO: 15119 - protein, 25 aa, Artificial Sequence
  Description of Artificial Sequence: Synthetic peptide
TAAKLMVVIPDYNTYKNTCDGTTFT

SEQ ID NO: 15120 - protein, 25 aa, Artificial Sequence
  Description of Artificial Sequence: Synthetic peptide
RVCTNYMPYFFTLLLQLCTFTRSTN

SEQ ID NO: 15121 - protein, 25 aa, Artificial Sequence
  Description of Artificial Sequence: Synthetic peptide
NRVCTNYMPYFFTLLLQLCTFTRST

SEQ ID NO: 15122 - protein, 25 aa, Artificial Sequence
  Description of Artificial Sequence: Synthetic peptide
VCTNYMPYFFTLLLQLCTFTRSTNS

SEQ ID NO: 15123 - protein, 25 aa, Artificial Sequence
  Description of Artificial Sequence: Synthetic peptide
SNYSGVVTTVMFLARGIVFMCVEYC

SEQ ID NO: 15124 - protein, 25 aa, Artificial Sequence
  Description of Artificial Sequence: Synthetic peptide
NYSGVVTTVMFLARGIVFMCVEYCP

SEQ ID NO: 15125 - protein, 25 aa, Artificial Sequence
  Description of Artificial Sequence: Synthetic peptide
LGSLIYSTAALGVLMSNLGMPSYCT

SEQ ID NO: 15126 - protein, 25 aa, Artificial Sequence
  Description of Artificial Sequence: Synthetic peptide
VCLGSLIYSTAALGVLMSNLGMPSY

SEQ ID NO: 15127 - protein, 25 aa, Artificial Sequence
  Description of Artificial Sequence: Synthetic peptide
CLGSLIYSTAALGVLMSNLGMPSYC

SEQ ID NO: 15128 - protein, 25 aa, Artificial Sequence
  Description of Artificial Sequence: Synthetic peptide
QEKNFTTAPAICHDGKAHFPREGVF

SEQ ID NO: 15129 - protein, 25 aa, Artificial Sequence
  Description of Artificial Sequence: Synthetic peptide
AQEKNFTTAPAICHDGKAHFPREGV

SEQ ID NO: 15130 - protein, 25 aa, Artificial Sequence
  Description of Artificial Sequence: Synthetic peptide
GAIKLDDKDPNFKDQVILLNKHIDA

SEQ ID NO: 15131 - protein, 25 aa, Artificial Sequence
  Description of Artificial Sequence: Synthetic peptide
VESCGNFKVTKGKAKKGAWNIGEQK

SEQ ID NO: 15132 - protein, 25 aa, Artificial Sequence
  Description of Artificial Sequence: Synthetic peptide
QIVESCGNFKVTKGKAKKGAWNIGE

SEQ ID NO: 15133 - protein, 25 aa, Artificial Sequence
  Description of Artificial Sequence: Synthetic peptide
IVESCGNFKVTKGKAKKGAWNIGEQ

SEQ ID NO: 15134 - protein, 25 aa, Artificial Sequence
  Description of Artificial Sequence: Synthetic peptide
PTDQSSYIVDSVTVKNGSIHLYFDK

SEQ ID NO: 15135 - protein, 25 aa, Artificial Sequence
  Description of Artificial Sequence: Synthetic peptide
EMLAKALRKVPTDNYITTYPGQGLN

SEQ ID NO: 15136 - protein, 25 aa, Artificial Sequence
  Description of Artificial Sequence: Synthetic peptide
TLADAGFIKQYGDCLGDIAARDLIC

SEQ ID NO: 15137 - protein, 25 aa, Artificial Sequence
  Description of Artificial Sequence: Synthetic peptide
LADAGFIKQYGDCLGDIAARDLICA

SEQ ID NO: 15138 - protein, 25 aa, Artificial Sequence
  Description of Artificial Sequence: Synthetic peptide
ADAGFIKQYGDCLGDIAARDLICAQ

SEQ ID NO: 15139 - protein, 25 aa, Artificial Sequence
  Description of Artificial Sequence: Synthetic peptide
TYVPAQEKNFTTAPAICHDGKAHFP

SEQ ID NO: 15140 - protein, 25 aa, Artificial Sequence
  Description of Artificial Sequence: Synthetic peptide
VTYVPAQEKNFTTAPAICHDGKAHF

SEQ ID NO: 15141 - protein, 25 aa, Artificial Sequence
  Description of Artificial Sequence: Synthetic peptide
HVTYVPAQEKNFTTAPAICHDGKAH

SEQ ID NO: 15142 - protein, 25 aa, Artificial Sequence
  Description of Artificial Sequence: Synthetic peptide
SRELKVTFFPDLNGDVVAIDYKHYT

SEQ ID NO: 15143 - protein, 25 aa, Artificial Sequence
  Description of Artificial Sequence: Synthetic peptide
ASRELKVTFFPDLNGDVVAIDYKHY

SEQ ID NO: 15144 - protein, 25 aa, Artificial Sequence
  Description of Artificial Sequence: Synthetic peptide
NAQALNTLVKQLSSNFGAISSVLND

SEQ ID NO: 15145 - protein, 25 aa, Artificial Sequence
  Description of Artificial Sequence: Synthetic peptide
QNAQALNTLVKQLSSNFGAISSVLN

SEQ ID NO: 15146 - protein, 25 aa, Artificial Sequence
  Description of Artificial Sequence: Synthetic peptide
NPTDQSSYIVDSVTVKNGSIHLYFD

SEQ ID NO: 15147 - protein, 25 aa, Artificial Sequence
  Description of Artificial Sequence: Synthetic peptide
INPTDQSSYIVDSVTVKNGSIHLYF

SEQ ID NO: 15148 - protein, 25 aa, Artificial Sequence
  Description of Artificial Sequence: Synthetic peptide
PINPTDQSSYIVDSVTVKNGSIHLY

SEQ ID NO: 15149 - protein, 25 aa, Artificial Sequence
  Description of Artificial Sequence: Synthetic peptide
KRPINPTDQSSYIVDSVTVKNGSIH

SEQ ID NO: 15150 - protein, 25 aa, Artificial Sequence
  Description of Artificial Sequence: Synthetic peptide
RPINPTDQSSYIVDSVTVKNGSIHL

SEQ ID NO: 15151 - protein, 25 aa, Artificial Sequence
  Description of Artificial Sequence: Synthetic peptide
AALGVLMSNLGMPSYCTGYREGYLN

SEQ ID NO: 15152 - protein, 25 aa, Artificial Sequence
  Description of Artificial Sequence: Synthetic peptide
LGVLMSNLGMPSYCTGYREGYLNST

SEQ ID NO: 15153 - protein, 25 aa, Artificial Sequence
  Description of Artificial Sequence: Synthetic peptide
ALGVLMSNLGMPSYCTGYREGYLNS

SEQ ID NO: 15154 - protein, 25 aa, Artificial Sequence
  Description of Artificial Sequence: Synthetic peptide
IRKSNHNFLVQAGNVQLRVIGHSMQ

SEQ ID NO: 15155 - protein, 25 aa, Artificial Sequence
  Description of Artificial Sequence: Synthetic peptide
YTTTIKPVTYKLDGVVCTEIDPKLD

SEQ ID NO: 15156 - protein, 25 aa, Artificial Sequence
  Description of Artificial Sequence: Synthetic peptide
SYTTTIKPVTYKLDGVVCTEIDPKL

SEQ ID NO: 15157 - protein, 25 aa, Artificial Sequence
  Description of Artificial Sequence: Synthetic peptide
TTTIKPVTYKLDGVVCTEIDPKLDN

SEQ ID NO: 15158 - protein, 25 aa, Artificial Sequence
  Description of Artificial Sequence: Synthetic peptide
TFSSTFNVPMEKLKTLVATAEAELA

SEQ ID NO: 15159 - protein, 25 aa, Artificial Sequence
  Description of Artificial Sequence: Synthetic peptide
GVSFSTFEEAALCTFLLNKEMYLKL

SEQ ID NO: 15160 - protein, 25 aa, Artificial Sequence
  Description of Artificial Sequence: Synthetic peptide
YQCAMRPNFTIKGSFLNGSCGSVGF

SEQ ID NO: 15161 - protein, 25 aa, Artificial Sequence
  Description of Artificial Sequence: Synthetic peptide
VYQCAMRPNFTIKGSFLNGSCGSVG

SEQ ID NO: 15162 - protein, 25 aa, Artificial Sequence
  Description of Artificial Sequence: Synthetic peptide
CAMRPNFTIKGSFLNGSCGSVGFNI

SEQ ID NO: 15163 - protein, 25 aa, Artificial Sequence
  Description of Artificial Sequence: Synthetic peptide
AMRPNFTIKGSFLNGSCGSVGFNID

SEQ ID NO: 15164 - protein, 25 aa, Artificial Sequence
  Description of Artificial Sequence: Synthetic peptide
QCAMRPNFTIKGSFLNGSCGSVGFN

SEQ ID NO: 15165 - protein, 25 aa, Artificial Sequence
  Description of Artificial Sequence: Synthetic peptide
MRPNFTIKGSFLNGSCGSVGFNIDY

SEQ ID NO: 15166 - protein, 25 aa, Artificial Sequence
  Description of Artificial Sequence: Synthetic peptide
GPTYLDGADVTKIKPHNSHEGKTFY

SEQ ID NO: 15167 - protein, 25 aa, Artificial Sequence
  Description of Artificial Sequence: Synthetic peptide
DASGKPVPYCYDTNVLEGSVAYESL

SEQ ID NO: 15168 - protein, 25 aa, Artificial Sequence
  Description of Artificial Sequence: Synthetic peptide
FKDASGKPVPYCYDTNVLEGSVAYE

SEQ ID NO: 15169 - protein, 25 aa, Artificial Sequence
  Description of Artificial Sequence: Synthetic peptide
IFKDASGKPVPYCYDTNVLEGSVAY

SEQ ID NO: 15170 - protein, 25 aa, Artificial Sequence
  Description of Artificial Sequence: Synthetic peptide
KDASGKPVPYCYDTNVLEGSVAYES

SEQ ID NO: 15171 - protein, 25 aa, Artificial Sequence
  Description of Artificial Sequence: Synthetic peptide
LQKEKVNINIVGDFKLNEEIAIILA

SEQ ID NO: 15172 - protein, 25 aa, Artificial Sequence
  Description of Artificial Sequence: Synthetic peptide
ILQKEKVNINIVGDFKLNEEIAIIL

SEQ ID NO: 15173 - protein, 25 aa, Artificial Sequence
  Description of Artificial Sequence: Synthetic peptide
DTSLSGFKLKDCVMYASAVVLLILM

SEQ ID NO: 15174 - protein, 25 aa, Artificial Sequence
  Description of Artificial Sequence: Synthetic peptide
VDTSLSGFKLKDCVMYASAVVLLIL

SEQ ID NO: 15175 - protein, 25 aa, Artificial Sequence
  Description of Artificial Sequence: Synthetic peptide
NTFSSTFNVPMEKLKTLVATAEAEL

SEQ ID NO: 15176 - protein, 25 aa, Artificial Sequence
  Description of Artificial Sequence: Synthetic peptide
LLSAGIFGADPIHSLRVCVDTVRTN

SEQ ID NO: 15177 - protein, 25 aa, Artificial Sequence
  Description of Artificial Sequence: Synthetic peptide
LSAGIFGADPIHSLRVCVDTVRTNV

SEQ ID NO: 15178 - protein, 25 aa, Artificial Sequence
  Description of Artificial Sequence: Synthetic peptide
AGIFGADPIHSLRVCVDTVRTNVYL

SEQ ID NO: 15179 - protein, 25 aa, Artificial Sequence
  Description of Artificial Sequence: Synthetic peptide
SAGIFGADPIHSLRVCVDTVRTNVY

SEQ ID NO: 15180 - protein, 25 aa, Artificial Sequence
  Description of Artificial Sequence: Synthetic peptide
DISASIVAGGIVAIVVTCLAYYFMR

SEQ ID NO: 15181 - protein, 25 aa, Artificial Sequence
  Description of Artificial Sequence: Synthetic peptide
APLLSAGIFGADPIHSLRVCVDTVR

SEQ ID NO: 15182 - protein, 25 aa, Artificial Sequence
  Description of Artificial Sequence: Synthetic peptide
PLLSAGIFGADPIHSLRVCVDTVRT

SEQ ID NO: 15183 - protein, 25 aa, Artificial Sequence
  Description of Artificial Sequence: Synthetic peptide
DFGDFIQTTPGSGVPVVDSYYSLLM

SEQ ID NO: 15184 - protein, 25 aa, Artificial Sequence
  Description of Artificial Sequence: Synthetic peptide
YDFGDFIQTTPGSGVPVVDSYYSLL

SEQ ID NO: 15185 - protein, 25 aa, Artificial Sequence
  Description of Artificial Sequence: Synthetic peptide
NWYDFGDFIQTTPGSGVPVVDSYYS

SEQ ID NO: 15186 - protein, 25 aa, Artificial Sequence
  Description of Artificial Sequence: Synthetic peptide
GNWYDFGDFIQTTPGSGVPVVDSYY

SEQ ID NO: 15187 - protein, 25 aa, Artificial Sequence
  Description of Artificial Sequence: Synthetic peptide
WYDFGDFIQTTPGSGVPVVDSYYSL

SEQ ID NO: 15188 - protein, 25 aa, Artificial Sequence
  Description of Artificial Sequence: Synthetic peptide
KEKVNINIVGDFKLNEEIAIILASF

SEQ ID NO: 15189 - protein, 25 aa, Artificial Sequence
  Description of Artificial Sequence: Synthetic peptide
KVNINIVGDFKLNEEIAIILASFSA

SEQ ID NO: 15190 - protein, 25 aa, Artificial Sequence
  Description of Artificial Sequence: Synthetic peptide
EKVNINIVGDFKLNEEIAIILASFS

SEQ ID NO: 15191 - protein, 25 aa, Artificial Sequence
  Description of Artificial Sequence: Synthetic peptide
KHTTCCSLSHRFYRLANECAQVLSE

SEQ ID NO: 15192 - protein, 25 aa, Artificial Sequence
  Description of Artificial Sequence: Synthetic peptide
DGVVQQLPETYFTQSRNLQEFKPRS

SEQ ID NO: 15193 - protein, 25 aa, Artificial Sequence
  Description of Artificial Sequence: Synthetic peptide
IDITFLKKDAPYIVGDVVQEGVLTA

SEQ ID NO: 15194 - protein, 25 aa, Artificial Sequence
  Description of Artificial Sequence: Synthetic peptide
DIDITFLKKDAPYIVGDVVQEGVLT

SEQ ID NO: 15195 - protein, 25 aa, Artificial Sequence
  Description of Artificial Sequence: Synthetic peptide
SKIITLKKRWQLALSKGVHFVCNLL

SEQ ID NO: 15196 - protein, 25 aa, Artificial Sequence
  Description of Artificial Sequence: Synthetic peptide
DDFTGCVIAWNSNNLDSKVGGNYNY

SEQ ID NO: 15197 - protein, 25 aa, Artificial Sequence
  Description of Artificial Sequence: Synthetic peptide
DFTGCVIAWNSNNLDSKVGGNYNYL

SEQ ID NO: 15198 - protein, 25 aa, Artificial Sequence
  Description of Artificial Sequence: Synthetic peptide
LSVCLGSLIYSTAALGVLMSNLGMP

SEQ ID NO: 15199 - protein, 25 aa, Artificial Sequence
  Description of Artificial Sequence: Synthetic peptide
LLLSVCLGSLIYSTAALGVLMSNLG

SEQ ID NO: 15200 - protein, 25 aa, Artificial Sequence
  Description of Artificial Sequence: Synthetic peptide
LLSVCLGSLIYSTAALGVLMSNLGM

SEQ ID NO: 15201 - protein, 25 aa, Artificial Sequence
  Description of Artificial Sequence: Synthetic peptide
SVCLGSLIYSTAALGVLMSNLGMPS

SEQ ID NO: 15202 - protein, 25 aa, Artificial Sequence
  Description of Artificial Sequence: Synthetic peptide
FLLLSVCLGSLIYSTAALGVLMSNL

SEQ ID NO: 15203 - protein, 25 aa, Artificial Sequence
  Description of Artificial Sequence: Synthetic peptide
WFLLLSVCLGSLIYSTAALGVLMSN

SEQ ID NO: 15204 - protein, 25 aa, Artificial Sequence
  Description of Artificial Sequence: Synthetic peptide
GMPSYCTGYREGYLNSTNVTIATYC

SEQ ID NO: 15205 - protein, 25 aa, Artificial Sequence
  Description of Artificial Sequence: Synthetic peptide
VAIHADQLTPTWRVYSTGSNVFQTR

SEQ ID NO: 15206 - protein, 25 aa, Artificial Sequence
  Description of Artificial Sequence: Synthetic peptide
AIHADQLTPTWRVYSTGSNVFQTRA

SEQ ID NO: 15207 - protein, 25 aa, Artificial Sequence
  Description of Artificial Sequence: Synthetic peptide
PVAIHADQLTPTWRVYSTGSNVFQT

SEQ ID NO: 15208 - protein, 25 aa, Artificial Sequence
  Description of Artificial Sequence: Synthetic peptide
QGMDNLACEDLKPVSEEVVENPTIQ

SEQ ID NO: 15209 - protein, 25 aa, Artificial Sequence
  Description of Artificial Sequence: Synthetic peptide
AYVNTFSSTFNVPMEKLKTLVATAE

SEQ ID NO: 15210 - protein, 25 aa, Artificial Sequence
  Description of Artificial Sequence: Synthetic peptide
YVNTFSSTFNVPMEKLKTLVATAEA

SEQ ID NO: 15211 - protein, 25 aa, Artificial Sequence
  Description of Artificial Sequence: Synthetic peptide
STSGRWVLNNDYYRSLPGVFCGVDA

SEQ ID NO: 15212 - protein, 25 aa, Artificial Sequence
  Description of Artificial Sequence: Synthetic peptide
DAAMQRKLEKMADQAMTQMYKQARS

SEQ ID NO: 15213 - protein, 25 aa, Artificial Sequence
  Description of Artificial Sequence: Synthetic peptide
EFDRDAAMQRKLEKMADQAMTQMYK

SEQ ID NO: 15214 - protein, 25 aa, Artificial Sequence
  Description of Artificial Sequence: Synthetic peptide
FDRDAAMQRKLEKMADQAMTQMYKQ

SEQ ID NO: 15215 - protein, 25 aa, Artificial Sequence
  Description of Artificial Sequence: Synthetic peptide
DRDAAMQRKLEKMADQAMTQMYKQA

SEQ ID NO: 15216 - protein, 25 aa, Artificial Sequence
  Description of Artificial Sequence: Synthetic peptide
RDAAMQRKLEKMADQAMTQMYKQAR

SEQ ID NO: 15217 - protein, 25 aa, Artificial Sequence
  Description of Artificial Sequence: Synthetic peptide
TVKNGSIHLYFDKAGQKTYERHSLS

SEQ ID NO: 15218 - protein, 25 aa, Artificial Sequence
  Description of Artificial Sequence: Synthetic peptide
VKNGSIHLYFDKAGQKTYERHSLSH

SEQ ID NO: 15219 - protein, 25 aa, Artificial Sequence
  Description of Artificial Sequence: Synthetic peptide
KNGSIHLYFDKAGQKTYERHSLSHF

SEQ ID NO: 15220 - protein, 25 aa, Artificial Sequence
  Description of Artificial Sequence: Synthetic peptide
SVTVKNGSIHLYFDKAGQKTYERHS

SEQ ID NO: 15221 - protein, 25 aa, Artificial Sequence
  Description of Artificial Sequence: Synthetic peptide
VTVKNGSIHLYFDKAGQKTYERHSL

SEQ ID NO: 15222 - protein, 25 aa, Artificial Sequence
  Description of Artificial Sequence: Synthetic peptide
IVDSVTVKNGSIHLYFDKAGQKTYE

SEQ ID NO: 15223 - protein, 25 aa, Artificial Sequence
  Description of Artificial Sequence: Synthetic peptide
VDSVTVKNGSIHLYFDKAGQKTYER

SEQ ID NO: 15224 - protein, 25 aa, Artificial Sequence
  Description of Artificial Sequence: Synthetic peptide
SYIVDSVTVKNGSIHLYFDKAGQKT

SEQ ID NO: 15225 - protein, 25 aa, Artificial Sequence
  Description of Artificial Sequence: Synthetic peptide
YIVDSVTVKNGSIHLYFDKAGQKTY

SEQ ID NO: 15226 - protein, 25 aa, Artificial Sequence
  Description of Artificial Sequence: Synthetic peptide
TLEETKFLTENLLLYIDINGNLHPD

SEQ ID NO: 15227 - protein, 25 aa, Artificial Sequence
  Description of Artificial Sequence: Synthetic peptide
LEETKFLTENLLLYIDINGNLHPDS

SEQ ID NO: 15228 - protein, 25 aa, Artificial Sequence
  Description of Artificial Sequence: Synthetic peptide
ALCTFLLNKEMYLKLRSDVLLPLTQ

SEQ ID NO: 15229 - protein, 25 aa, Artificial Sequence
  Description of Artificial Sequence: Synthetic peptide
LCTFLLNKEMYLKLRSDVLLPLTQY

SEQ ID NO: 15230 - protein, 25 aa, Artificial Sequence
  Description of Artificial Sequence: Synthetic peptide
CTFLLNKEMYLKLRSDVLLPLTQYN

SEQ ID NO: 15231 - protein, 25 aa, Artificial Sequence
  Description of Artificial Sequence: Synthetic peptide
ATNNAMQVESDDYIATNGPLKVGGS

SEQ ID NO: 15232 - protein, 25 aa, Artificial Sequence
  Description of Artificial Sequence: Synthetic peptide
YGTEDDYQGKPLEFGATSAALQPEE

SEQ ID NO: 15233 - protein, 25 aa, Artificial Sequence
  Description of Artificial Sequence: Synthetic peptide
GTEDDYQGKPLEFGATSAALQPEEE

SEQ ID NO: 15234 - protein, 25 aa, Artificial Sequence
  Description of Artificial Sequence: Synthetic peptide
LDGISQYSLRLIDAMMFTSDLATNN

SEQ ID NO: 15235 - protein, 25 aa, Artificial Sequence
  Description of Artificial Sequence: Synthetic peptide
DGISQYSLRLIDAMMFTSDLATNNL

SEQ ID NO: 15236 - protein, 25 aa, Artificial Sequence
  Description of Artificial Sequence: Synthetic peptide
VVFNGVSFSTFEEAALCTFLLNKEM

SEQ ID NO: 15237 - protein, 25 aa, Artificial Sequence
  Description of Artificial Sequence: Synthetic peptide
RVVFNGVSFSTFEEAALCTFLLNKE

SEQ ID NO: 15238 - protein, 25 aa, Artificial Sequence
  Description of Artificial Sequence: Synthetic peptide
VFNGVSFSTFEEAALCTFLLNKEMY

SEQ ID NO: 15239 - protein, 25 aa, Artificial Sequence
  Description of Artificial Sequence: Synthetic peptide
FNGVSFSTFEEAALCTFLLNKEMYL

SEQ ID NO: 15240 - protein, 25 aa, Artificial Sequence
  Description of Artificial Sequence: Synthetic peptide
KRRVVFNGVSFSTFEEAALCTFLLN

SEQ ID NO: 15241 - protein, 25 aa, Artificial Sequence
  Description of Artificial Sequence: Synthetic peptide
RRVVFNGVSFSTFEEAALCTFLLNK

SEQ ID NO: 15242 - protein, 25 aa, Artificial Sequence
  Description of Artificial Sequence: Synthetic peptide
VENPDILRVYANLGERVRQALLKTV

SEQ ID NO: 15243 - protein, 25 aa, Artificial Sequence
  Description of Artificial Sequence: Synthetic peptide
AYTVELGTEVNEFACVVADAVIKTL

SEQ ID NO: 15244 - protein, 25 aa, Artificial Sequence
  Description of Artificial Sequence: Synthetic peptide
AVKMFDAYVNTFSSTFNVPMEKLKT

SEQ ID NO: 15245 - protein, 25 aa, Artificial Sequence
  Description of Artificial Sequence: Synthetic peptide
TRFQTLLALHRSYLTPGDSSSGWTA

SEQ ID NO: 15246 - protein, 25 aa, Artificial Sequence
  Description of Artificial Sequence: Synthetic peptide
VFLLVTLAILTALRLCAYCCNIVNV

SEQ ID NO: 15247 - protein, 25 aa, Artificial Sequence
  Description of Artificial Sequence: Synthetic peptide
VVFLLVTLAILTALRLCAYCCNIVN

SEQ ID NO: 15248 - protein, 25 aa, Artificial Sequence
  Description of Artificial Sequence: Synthetic peptide
FLLVTLAILTALRLCAYCCNIVNVS

SEQ ID NO: 15249 - protein, 25 aa, Artificial Sequence
  Description of Artificial Sequence: Synthetic peptide
LLVTLAILTALRLCAYCCNIVNVSL

SEQ ID NO: 15250 - protein, 25 aa, Artificial Sequence
  Description of Artificial Sequence: Synthetic peptide
AFGGCVFSYVGCHNKCAYWVPRASA

SEQ ID NO: 15251 - protein, 25 aa, Artificial Sequence
  Description of Artificial Sequence: Synthetic peptide
VVNVVTTKIALKGGKIVNNWLKQLI

SEQ ID NO: 15252 - protein, 25 aa, Artificial Sequence
  Description of Artificial Sequence: Synthetic peptide
QVVNVVTTKIALKGGKIVNNWLKQL

SEQ ID NO: 15253 - protein, 25 aa, Artificial Sequence
  Description of Artificial Sequence: Synthetic peptide
IGLALYYPSARIVYTACSHAAVDAL

SEQ ID NO: 15254 - protein, 25 aa, Artificial Sequence
  Description of Artificial Sequence: Synthetic peptide
YMLTYNKVENMTPRDLGACIDCSAR

SEQ ID NO: 15255 - protein, 25 aa, Artificial Sequence
  Description of Artificial Sequence: Synthetic peptide
LKWARFPKSDGTGTIYTELEPPCRF

SEQ ID NO: 15256 - protein, 25 aa, Artificial Sequence
  Description of Artificial Sequence: Synthetic peptide
FPKSDGTGTIYTELEPPCRFVTDTP

SEQ ID NO: 15257 - protein, 25 aa, Artificial Sequence
  Description of Artificial Sequence: Synthetic peptide
WARFPKSDGTGTIYTELEPPCRFVT

SEQ ID NO: 15258 - protein, 25 aa, Artificial Sequence
  Description of Artificial Sequence: Synthetic peptide
DLKWARFPKSDGTGTIYTELEPPCR

SEQ ID NO: 15259 - protein, 25 aa, Artificial Sequence
  Description of Artificial Sequence: Synthetic peptide
RFPKSDGTGTIYTELEPPCRFVTDT

SEQ ID NO: 15260 - protein, 25 aa, Artificial Sequence
  Description of Artificial Sequence: Synthetic peptide
KWARFPKSDGTGTIYTELEPPCRFV

SEQ ID NO: 15261 - protein, 25 aa, Artificial Sequence
  Description of Artificial Sequence: Synthetic peptide
QDLKWARFPKSDGTGTIYTELEPPC

SEQ ID NO: 15262 - protein, 25 aa, Artificial Sequence
  Description of Artificial Sequence: Synthetic peptide
ARFPKSDGTGTIYTELEPPCRFVTD

SEQ ID NO: 15263 - protein, 25 aa, Artificial Sequence
  Description of Artificial Sequence: Synthetic peptide
WYDFVENPDILRVYANLGERVRQAL

SEQ ID NO: 15264 - protein, 25 aa, Artificial Sequence
  Description of Artificial Sequence: Synthetic peptide
DWYDFVENPDILRVYANLGERVRQA

SEQ ID NO: 15265 - protein, 25 aa, Artificial Sequence
  Description of Artificial Sequence: Synthetic peptide
ISVTSNYSGVVTTVMFLARGIVFMC

SEQ ID NO: 15266 - protein, 25 aa, Artificial Sequence
  Description of Artificial Sequence: Synthetic peptide
IISVTSNYSGVVTTVMFLARGIVFM

SEQ ID NO: 15267 - protein, 25 aa, Artificial Sequence
  Description of Artificial Sequence: Synthetic peptide
LIISVTSNYSGVVTTVMFLARGIVF

SEQ ID NO: 15268 - protein, 25 aa, Artificial Sequence
  Description of Artificial Sequence: Synthetic peptide
SAYTVELGTEVNEFACVVADAVIKT

SEQ ID NO: 15269 - protein, 25 aa, Artificial Sequence
  Description of Artificial Sequence: Synthetic peptide
CSAYTVELGTEVNEFACVVADAVIK

SEQ ID NO: 15270 - protein, 25 aa, Artificial Sequence
  Description of Artificial Sequence: Synthetic peptide
AFASEAARVVRSIFSRTLETAQNSV

SEQ ID NO: 15271 - protein, 25 aa, Artificial Sequence
  Description of Artificial Sequence: Synthetic peptide
SNYQHEETIYNLLKDCPAVAKHDFF

SEQ ID NO: 15272 - protein, 25 aa, Artificial Sequence
  Description of Artificial Sequence: Synthetic peptide
YQHEETIYNLLKDCPAVAKHDFFKF

SEQ ID NO: 15273 - protein, 25 aa, Artificial Sequence
  Description of Artificial Sequence: Synthetic peptide
NYQHEETIYNLLKDCPAVAKHDFFK

SEQ ID NO: 15274 - protein, 25 aa, Artificial Sequence
  Description of Artificial Sequence: Synthetic peptide
KIKACVEEVTTTLEETKFLTENLLL

SEQ ID NO: 15275 - protein, 25 aa, Artificial Sequence
  Description of Artificial Sequence: Synthetic peptide
KDWYDFVENPDILRVYANLGERVRQ

SEQ ID NO: 15276 - protein, 25 aa, Artificial Sequence
  Description of Artificial Sequence: Synthetic peptide
ITLKKRWQLALSKGVHFVCNLLLLF

SEQ ID NO: 15277 - protein, 25 aa, Artificial Sequence
  Description of Artificial Sequence: Synthetic peptide
IITLKKRWQLALSKGVHFVCNLLLL

SEQ ID NO: 15278 - protein, 25 aa, Artificial Sequence
  Description of Artificial Sequence: Synthetic peptide
FVTQRNFYEPQIITTDNTFVSGNCD

SEQ ID NO: 15279 - protein, 25 aa, Artificial Sequence
  Description of Artificial Sequence: Synthetic peptide
GGKGFCKLHNWNCVNCDTFCAGSTF

SEQ ID NO: 15280 - protein, 25 aa, Artificial Sequence
  Description of Artificial Sequence: Synthetic peptide
NGGKGFCKLHNWNCVNCDTFCAGST

SEQ ID NO: 15281 - protein, 25 aa, Artificial Sequence
  Description of Artificial Sequence: Synthetic peptide
GLDSLDTYPSLETIQITISSFKWDL

SEQ ID NO: 15282 - protein, 25 aa, Artificial Sequence
  Description of Artificial Sequence: Synthetic peptide
KAIVSTIQRKYKGIKIQEGVVDYGA

SEQ ID NO: 15283 - protein, 25 aa, Artificial Sequence
  Description of Artificial Sequence: Synthetic peptide
AIVSTIQRKYKGIKIQEGVVDYGAR

SEQ ID NO: 15284 - protein, 25 aa, Artificial Sequence
  Description of Artificial Sequence: Synthetic peptide
VSTIQRKYKGIKIQEGVVDYGARFY

SEQ ID NO: 15285 - protein, 25 aa, Artificial Sequence
  Description of Artificial Sequence: Synthetic peptide
IVSTIQRKYKGIKIQEGVVDYGARF

SEQ ID NO: 15286 - protein, 25 aa, Artificial Sequence
  Description of Artificial Sequence: Synthetic peptide
TKAIVSTIQRKYKGIKIQEGVVDYG

SEQ ID NO: 15287 - protein, 25 aa, Artificial Sequence
  Description of Artificial Sequence: Synthetic peptide
LPKGIMMNVAKYTQLCQYLNTLTLA

SEQ ID NO: 15288 - protein, 25 aa, Artificial Sequence
  Description of Artificial Sequence: Synthetic peptide
DLQDLKWARFPKSDGTGTIYTELEP

SEQ ID NO: 15289 - protein, 25 aa, Artificial Sequence
  Description of Artificial Sequence: Synthetic peptide
NSIIKTIQPRVEKKKLDGFMGRIRS

SEQ ID NO: 15290 - protein, 25 aa, Artificial Sequence
  Description of Artificial Sequence: Synthetic peptide
NSTYASQGLVASIKNFKSVLYYQNN

SEQ ID NO: 15291 - protein, 25 aa, Artificial Sequence
  Description of Artificial Sequence: Synthetic peptide
TDFVNEFYAYLRKHFSMMILSDDAV

SEQ ID NO: 15292 - protein, 25 aa, Artificial Sequence
  Description of Artificial Sequence: Synthetic peptide
DTDFVNEFYAYLRKHFSMMILSDDA

SEQ ID NO: 15293 - protein, 25 aa, Artificial Sequence
  Description of Artificial Sequence: Synthetic peptide
IKVTLVFLFVAAIFYLITPVHVMSK

SEQ ID NO: 15294 - protein, 25 aa, Artificial Sequence
  Description of Artificial Sequence: Synthetic peptide
LKDCVMYASAVVLLILMTARTVYDD

SEQ ID NO: 15295 - protein, 25 aa, Artificial Sequence
  Description of Artificial Sequence: Synthetic peptide
TPKYKFVRIQPGQTFSVLACYNGSP

SEQ ID NO: 15296 - protein, 25 aa, Artificial Sequence
  Description of Artificial Sequence: Synthetic peptide
YTDFATSACVLAAECTIFKDASGKP

SEQ ID NO: 15297 - protein, 25 aa, Artificial Sequence
  Description of Artificial Sequence: Synthetic peptide
EYTDFATSACVLAAECTIFKDASGK

SEQ ID NO: 15298 - protein, 25 aa, Artificial Sequence
  Description of Artificial Sequence: Synthetic peptide
SKLWAQCVQLHNDILLAKDTTEAFE

SEQ ID NO: 15299 - protein, 25 aa, Artificial Sequence
  Description of Artificial Sequence: Synthetic peptide
GVHFVCNLLLLFVTVYSHLLLVAAG

SEQ ID NO: 15300 - protein, 25 aa, Artificial Sequence
  Description of Artificial Sequence: Synthetic peptide
KLKVDTANPKTPKYKFVRIQPGQTF

SEQ ID NO: 15301 - protein, 25 aa, Artificial Sequence
  Description of Artificial Sequence: Synthetic peptide
KGLNNLNRGMVLGSLAATVRLQAGN

SEQ ID NO: 15302 - protein, 25 aa, Artificial Sequence
  Description of Artificial Sequence: Synthetic peptide
PNASFDNFKFVCDNIKFADDLNQLT

SEQ ID NO: 15303 - protein, 25 aa, Artificial Sequence
  Description of Artificial Sequence: Synthetic peptide
VVFLHVTYVPAQEKNFTTAPAICHD

SEQ ID NO: 15304 - protein, 25 aa, Artificial Sequence
  Description of Artificial Sequence: Synthetic peptide
GVVFLHVTYVPAQEKNFTTAPAICH

SEQ ID NO: 15305 - protein, 25 aa, Artificial Sequence
  Description of Artificial Sequence: Synthetic peptide
VFLHVTYVPAQEKNFTTAPAICHDG

SEQ ID NO: 15306 - protein, 25 aa, Artificial Sequence
  Description of Artificial Sequence: Synthetic peptide
HGVVFLHVTYVPAQEKNFTTAPAIC

SEQ ID NO: 15307 - protein, 25 aa, Artificial Sequence
  Description of Artificial Sequence: Synthetic peptide
DGADVTKIKPHNSHEGKTFYVLPND

SEQ ID NO: 15308 - protein, 25 aa, Artificial Sequence
  Description of Artificial Sequence: Synthetic peptide
PTYLDGADVTKIKPHNSHEGKTFYV

SEQ ID NO: 15309 - protein, 25 aa, Artificial Sequence
  Description of Artificial Sequence: Synthetic peptide
LDGADVTKIKPHNSHEGKTFYVLPN

SEQ ID NO: 15310 - protein, 25 aa, Artificial Sequence
  Description of Artificial Sequence: Synthetic peptide
YLDGADVTKIKPHNSHEGKTFYVLP

SEQ ID NO: 15311 - protein, 25 aa, Artificial Sequence
  Description of Artificial Sequence: Synthetic peptide
TYLDGADVTKIKPHNSHEGKTFYVL

SEQ ID NO: 15312 - protein, 25 aa, Artificial Sequence
  Description of Artificial Sequence: Synthetic peptide
CHIDHPNPKGFCDLKGKYVQIPTTC

SEQ ID NO: 15313 - protein, 25 aa, Artificial Sequence
  Description of Artificial Sequence: Synthetic peptide
CRCHIDHPNPKGFCDLKGKYVQIPT

SEQ ID NO: 15314 - protein, 25 aa, Artificial Sequence
  Description of Artificial Sequence: Synthetic peptide
RCHIDHPNPKGFCDLKGKYVQIPTT

SEQ ID NO: 15315 - protein, 25 aa, Artificial Sequence
  Description of Artificial Sequence: Synthetic peptide
YLALYNKYKYFSGAMDTTSYREAAC

SEQ ID NO: 15316 - protein, 25 aa, Artificial Sequence
  Description of Artificial Sequence: Synthetic peptide
SEVGPEHSLAEYHNESGLKTILRKG

SEQ ID NO: 15317 - protein, 25 aa, Artificial Sequence
  Description of Artificial Sequence: Synthetic peptide
HNSEVGPEHSLAEYHNESGLKTILR

SEQ ID NO: 15318 - protein, 25 aa, Artificial Sequence
  Description of Artificial Sequence: Synthetic peptide
NSEVGPEHSLAEYHNESGLKTILRK

SEQ ID NO: 15319 - protein, 25 aa, Artificial Sequence
  Description of Artificial Sequence: Synthetic peptide
NASVVNIQKEIDRLNEVAKNLNESL

SEQ ID NO: 15320 - protein, 25 aa, Artificial Sequence
  Description of Artificial Sequence: Synthetic peptide
ASVVNIQKEIDRLNEVAKNLNESLI

SEQ ID NO: 15321 - protein, 25 aa, Artificial Sequence
  Description of Artificial Sequence: Synthetic peptide
PRVEKKKLDGFMGRIRSVYPVASPN

SEQ ID NO: 15322 - protein, 25 aa, Artificial Sequence
  Description of Artificial Sequence: Synthetic peptide
RVEKKKLDGFMGRIRSVYPVASPNE

SEQ ID NO: 15323 - protein, 25 aa, Artificial Sequence
  Description of Artificial Sequence: Synthetic peptide
PFEIKLAKKFDTFNGECPNFVFPLN

SEQ ID NO: 15324 - protein, 25 aa, Artificial Sequence
  Description of Artificial Sequence: Synthetic peptide
KLAKKFDTFNGECPNFVFPLNSIIK

SEQ ID NO: 15325 - protein, 25 aa, Artificial Sequence
  Description of Artificial Sequence: Synthetic peptide
LAKKFDTFNGECPNFVFPLNSIIKT

SEQ ID NO: 15326 - protein, 25 aa, Artificial Sequence
  Description of Artificial Sequence: Synthetic peptide
EIKLAKKFDTFNGECPNFVFPLNSI

SEQ ID NO: 15327 - protein, 25 aa, Artificial Sequence
  Description of Artificial Sequence: Synthetic peptide
FEIKLAKKFDTFNGECPNFVFPLNS

SEQ ID NO: 15328 - protein, 25 aa, Artificial Sequence
  Description of Artificial Sequence: Synthetic peptide
IKLAKKFDTFNGECPNFVFPLNSII

SEQ ID NO: 15329 - protein, 25 aa, Artificial Sequence
  Description of Artificial Sequence: Synthetic peptide
AMQRKLEKMADQAMTQMYKQARSED

SEQ ID NO: 15330 - protein, 25 aa, Artificial Sequence
  Description of Artificial Sequence: Synthetic peptide
FKEGVEFLRDGWEIVKFISTCACEI

SEQ ID NO: 15331 - protein, 25 aa, Artificial Sequence
  Description of Artificial Sequence: Synthetic peptide
TDFATSACVLAAECTIFKDASGKPV

SEQ ID NO: 15332 - protein, 25 aa, Artificial Sequence
  Description of Artificial Sequence: Synthetic peptide
TTRQVVNVVTTKIALKGGKIVNNWL

SEQ ID NO: 15333 - protein, 25 aa, Artificial Sequence
  Description of Artificial Sequence: Synthetic peptide
MSFPQSAPHGVVFLHVTYVPAQEKN

SEQ ID NO: 15334 - protein, 25 aa, Artificial Sequence
  Description of Artificial Sequence: Synthetic peptide
DVGDSAEVAVKMFDAYVNTFSSTFN

SEQ ID NO: 15335 - protein, 25 aa, Artificial Sequence
  Description of Artificial Sequence: Synthetic peptide
KDEDDNLIDSYFVVKRHTFSNYQHE

SEQ ID NO: 15336 - protein, 25 aa, Artificial Sequence
  Description of Artificial Sequence: Synthetic peptide
EKDEDDNLIDSYFVVKRHTFSNYQH

SEQ ID NO: 15337 - protein, 25 aa, Artificial Sequence
  Description of Artificial Sequence: Synthetic peptide
QEKDEDDNLIDSYFVVKRHTFSNYQ

SEQ ID NO: 15338 - protein, 25 aa, Artificial Sequence
  Description of Artificial Sequence: Synthetic peptide
LWEIQQVVDADSKIVQLSEISMDNS

SEQ ID NO: 15339 - protein, 25 aa, Artificial Sequence
  Description of Artificial Sequence: Synthetic peptide
SMQGAVDINKLCEEMLDNRATLQAI

SEQ ID NO: 15340 - protein, 25 aa, Artificial Sequence
  Description of Artificial Sequence: Synthetic peptide
LSMQGAVDINKLCEEMLDNRATLQA

SEQ ID NO: 15341 - protein, 25 aa, Artificial Sequence
  Description of Artificial Sequence: Synthetic peptide
DDTLRVEAFEYYHTTDPSFLGRYMS

SEQ ID NO: 15342 - protein, 25 aa, Artificial Sequence
  Description of Artificial Sequence: Synthetic peptide
LRVEAFEYYHTTDPSFLGRYMSALN

SEQ ID NO: 15343 - protein, 25 aa, Artificial Sequence
  Description of Artificial Sequence: Synthetic peptide
DTLRVEAFEYYHTTDPSFLGRYMSA

SEQ ID NO: 15344 - protein, 25 aa, Artificial Sequence
  Description of Artificial Sequence: Synthetic peptide
NDDTLRVEAFEYYHTTDPSFLGRYM

SEQ ID NO: 15345 - protein, 25 aa, Artificial Sequence
  Description of Artificial Sequence: Synthetic peptide
TLRVEAFEYYHTTDPSFLGRYMSAL

SEQ ID NO: 15346 - protein, 25 aa, Artificial Sequence
  Description of Artificial Sequence: Synthetic peptide
RVEAFEYYHTTDPSFLGRYMSALNH

SEQ ID NO: 15347 - protein, 25 aa, Artificial Sequence
  Description of Artificial Sequence: Synthetic peptide
ADVFHLYLQYIRKLHDELTGHMLDM

SEQ ID NO: 15348 - protein, 25 aa, Artificial Sequence
  Description of Artificial Sequence: Synthetic peptide
YFSGAMDTTSYREAACCHLAKALND

SEQ ID NO: 15349 - protein, 25 aa, Artificial Sequence
  Description of Artificial Sequence: Synthetic peptide
FSGAMDTTSYREAACCHLAKALNDF

SEQ ID NO: 15350 - protein, 25 aa, Artificial Sequence
  Description of Artificial Sequence: Synthetic peptide
GAMDTTSYREAACCHLAKALNDFSN

SEQ ID NO: 15351 - protein, 25 aa, Artificial Sequence
  Description of Artificial Sequence: Synthetic peptide
SGAMDTTSYREAACCHLAKALNDFS

SEQ ID NO: 15352 - protein, 25 aa, Artificial Sequence
  Description of Artificial Sequence: Synthetic peptide
EKFKEGVEFLRDGWEIVKFISTCAC

SEQ ID NO: 15353 - protein, 25 aa, Artificial Sequence
  Description of Artificial Sequence: Synthetic peptide
LDGFMGRIRSVYPVASPNECNQMCL

SEQ ID NO: 15354 - protein, 25 aa, Artificial Sequence
  Description of Artificial Sequence: Synthetic peptide
GFMGRIRSVYPVASPNECNQMCLST

SEQ ID NO: 15355 - protein, 25 aa, Artificial Sequence
  Description of Artificial Sequence: Synthetic peptide
DGFMGRIRSVYPVASPNECNQMCLS

SEQ ID NO: 15356 - protein, 25 aa, Artificial Sequence
  Description of Artificial Sequence: Synthetic peptide
FMGRIRSVYPVASPNECNQMCLSTL

SEQ ID NO: 15357 - protein, 25 aa, Artificial Sequence
  Description of Artificial Sequence: Synthetic peptide
KLDGFMGRIRSVYPVASPNECNQMC

SEQ ID NO: 15358 - protein, 25 aa, Artificial Sequence
  Description of Artificial Sequence: Synthetic peptide
VEVQPQLEMELTPVVQTIEVNSFSG

SEQ ID NO: 15359 - protein, 25 aa, Artificial Sequence
  Description of Artificial Sequence: Synthetic peptide
EVQPQLEMELTPVVQTIEVNSFSGY

SEQ ID NO: 15360 - protein, 25 aa, Artificial Sequence
  Description of Artificial Sequence: Synthetic peptide
VQPQLEMELTPVVQTIEVNSFSGYL

SEQ ID NO: 15361 - protein, 25 aa, Artificial Sequence
  Description of Artificial Sequence: Synthetic peptide
KTLVATAEAELAKNVSLDNVLSTFI

SEQ ID NO: 15362 - protein, 25 aa, Artificial Sequence
  Description of Artificial Sequence: Synthetic peptide
TACTDDNALAYYNTTKGGRFVLALL

SEQ ID NO: 15363 - protein, 25 aa, Artificial Sequence
  Description of Artificial Sequence: Synthetic peptide
ACTDDNALAYYNTTKGGRFVLALLS

SEQ ID NO: 15364 - protein, 25 aa, Artificial Sequence
  Description of Artificial Sequence: Synthetic peptide
TQTACTDDNALAYYNTTKGGRFVLA

SEQ ID NO: 15365 - protein, 25 aa, Artificial Sequence
  Description of Artificial Sequence: Synthetic peptide
QTACTDDNALAYYNTTKGGRFVLAL

SEQ ID NO: 15366 - protein, 25 aa, Artificial Sequence
  Description of Artificial Sequence: Synthetic peptide
TTQTACTDDNALAYYNTTKGGRFVL

SEQ ID NO: 15367 - protein, 25 aa, Artificial Sequence
  Description of Artificial Sequence: Synthetic peptide
CTDDNALAYYNTTKGGRFVLALLSD

SEQ ID NO: 15368 - protein, 25 aa, Artificial Sequence
  Description of Artificial Sequence: Synthetic peptide
GTTQTACTDDNALAYYNTTKGGRFV

SEQ ID NO: 15369 - protein, 25 aa, Artificial Sequence
  Description of Artificial Sequence: Synthetic peptide
IAWYTERSEKSYELQTPFEIKLAKK

SEQ ID NO: 15370 - protein, 25 aa, Artificial Sequence
  Description of Artificial Sequence: Synthetic peptide
EIAWYTERSEKSYELQTPFEIKLAK

SEQ ID NO: 15371 - protein, 25 aa, Artificial Sequence
  Description of Artificial Sequence: Synthetic peptide
SNLGMPSYCTGYREGYLNSTNVTIA

SEQ ID NO: 15372 - protein, 25 aa, Artificial Sequence
  Description of Artificial Sequence: Synthetic peptide
LMSNLGMPSYCTGYREGYLNSTNVT

SEQ ID NO: 15373 - protein, 25 aa, Artificial Sequence
  Description of Artificial Sequence: Synthetic peptide
NLGMPSYCTGYREGYLNSTNVTIAT

SEQ ID NO: 15374 - protein, 25 aa, Artificial Sequence
  Description of Artificial Sequence: Synthetic peptide
VLMSNLGMPSYCTGYREGYLNSTNV

SEQ ID NO: 15375 - protein, 25 aa, Artificial Sequence
  Description of Artificial Sequence: Synthetic peptide
MSNLGMPSYCTGYREGYLNSTNVTI

SEQ ID NO: 15376 - protein, 25 aa, Artificial Sequence
  Description of Artificial Sequence: Synthetic peptide
LGMPSYCTGYREGYLNSTNVTIATY

SEQ ID NO: 15377 - protein, 25 aa, Artificial Sequence
  Description of Artificial Sequence: Synthetic peptide
ALVYFLQSINFVRIIMRLWLCWKCR

SEQ ID NO: 15378 - protein, 25 aa, Artificial Sequence
  Description of Artificial Sequence: Synthetic peptide
DDNALAYYNTTKGGRFVLALLSDLQ

SEQ ID NO: 15379 - protein, 25 aa, Artificial Sequence
  Description of Artificial Sequence: Synthetic peptide
FDVLKSEDAQGMDNLACEDLKPVSE

SEQ ID NO: 15380 - protein, 25 aa, Artificial Sequence
  Description of Artificial Sequence: Synthetic peptide
SKPSVEQRKQDDKKIKACVEEVTTT

SEQ ID NO: 15381 - protein, 25 aa, Artificial Sequence
  Description of Artificial Sequence: Synthetic peptide
KPSVEQRKQDDKKIKACVEEVTTTL

SEQ ID NO: 15382 - protein, 25 aa, Artificial Sequence
  Description of Artificial Sequence: Synthetic peptide
QEYADVFHLYLQYIRKLHDELTGHM

SEQ ID NO: 15383 - protein, 25 aa, Artificial Sequence
  Description of Artificial Sequence: Synthetic peptide
EYADVFHLYLQYIRKLHDELTGHML

SEQ ID NO: 15384 - protein, 25 aa, Artificial Sequence
  Description of Artificial Sequence: Synthetic peptide
NQEYADVFHLYLQYIRKLHDELTGH

SEQ ID NO: 15385 - protein, 25 aa, Artificial Sequence
  Description of Artificial Sequence: Synthetic peptide
TRCLNRVCTNYMPYFFTLLLQLCTF

SEQ ID NO: 15386 - protein, 25 aa, Artificial Sequence
  Description of Artificial Sequence: Synthetic peptide
MNVLTLVYKVYYGNALDQAISMWAL

SEQ ID NO: 15387 - protein, 25 aa, Artificial Sequence
  Description of Artificial Sequence: Synthetic peptide
RVWTLMNVLTLVYKVYYGNALDQAI

SEQ ID NO: 15388 - protein, 25 aa, Artificial Sequence
  Description of Artificial Sequence: Synthetic peptide
LMNVLTLVYKVYYGNALDQAISMWA

SEQ ID NO: 15389 - protein, 25 aa, Artificial Sequence
  Description of Artificial Sequence: Synthetic peptide
RRVWTLMNVLTLVYKVYYGNALDQA

SEQ ID NO: 15390 - protein, 25 aa, Artificial Sequence
  Description of Artificial Sequence: Synthetic peptide
WTLMNVLTLVYKVYYGNALDQAISM

SEQ ID NO: 15391 - protein, 25 aa, Artificial Sequence
  Description of Artificial Sequence: Synthetic peptide
TLMNVLTLVYKVYYGNALDQAISMW

SEQ ID NO: 15392 - protein, 25 aa, Artificial Sequence
  Description of Artificial Sequence: Synthetic peptide
NVLTLVYKVYYGNALDQAISMWALI

SEQ ID NO: 15393 - protein, 25 aa, Artificial Sequence
  Description of Artificial Sequence: Synthetic peptide
VWTLMNVLTLVYKVYYGNALDQAIS

SEQ ID NO: 15394 - protein, 25 aa, Artificial Sequence
  Description of Artificial Sequence: Synthetic peptide
TARTVYDDGARRVWTLMNVLTLVYK

SEQ ID NO: 15395 - protein, 25 aa, Artificial Sequence
  Description of Artificial Sequence: Synthetic peptide
AANFCALILAYCNKTVGELGDVRET

SEQ ID NO: 15396 - protein, 25 aa, Artificial Sequence
  Description of Artificial Sequence: Synthetic peptide
EAANFCALILAYCNKTVGELGDVRE

SEQ ID NO: 15397 - protein, 25 aa, Artificial Sequence
  Description of Artificial Sequence: Synthetic peptide
ANFCALILAYCNKTVGELGDVRETM

SEQ ID NO: 15398 - protein, 25 aa, Artificial Sequence
  Description of Artificial Sequence: Synthetic peptide
DEFTPFDVVRQCSGVTFQSAVKRTI

SEQ ID NO: 15399 - protein, 25 aa, Artificial Sequence
  Description of Artificial Sequence: Synthetic peptide
TSEDMLNPNYEDLLIRKSNHNFLVQ

SEQ ID NO: 15400 - protein, 25 aa, Artificial Sequence
  Description of Artificial Sequence: Synthetic peptide
SVRVVTTFDSEYCRHGTCERSEAGV

SEQ ID NO: 15401 - protein, 25 aa, Artificial Sequence
  Description of Artificial Sequence: Synthetic peptide
GLFCLLNRYFRLTLGVYDYLVSTQE

SEQ ID NO: 15402 - protein, 25 aa, Artificial Sequence
  Description of Artificial Sequence: Synthetic peptide
LIDSYFVVKRHTFSNYQHEETIYNL

SEQ ID NO: 15403 - protein, 25 aa, Artificial Sequence
  Description of Artificial Sequence: Synthetic peptide
NLIDSYFVVKRHTFSNYQHEETIYN

SEQ ID NO: 15404 - protein, 25 aa, Artificial Sequence
  Description of Artificial Sequence: Synthetic peptide
DNLIDSYFVVKRHTFSNYQHEETIY

SEQ ID NO: 15405 - protein, 25 aa, Artificial Sequence
  Description of Artificial Sequence: Synthetic peptide
EDDNLIDSYFVVKRHTFSNYQHEET

SEQ ID NO: 15406 - protein, 25 aa, Artificial Sequence
  Description of Artificial Sequence: Synthetic peptide
DDNLIDSYFVVKRHTFSNYQHEETI

SEQ ID NO: 15407 - protein, 25 aa, Artificial Sequence
  Description of Artificial Sequence: Synthetic peptide
QQVVDADSKIVQLSEISMDNSPNLA

SEQ ID NO: 15408 - protein, 25 aa, Artificial Sequence
  Description of Artificial Sequence: Synthetic peptide
VVDADSKIVQLSEISMDNSPNLAWP

SEQ ID NO: 15409 - protein, 25 aa, Artificial Sequence
  Description of Artificial Sequence: Synthetic peptide
QVVDADSKIVQLSEISMDNSPNLAW

SEQ ID NO: 15410 - protein, 25 aa, Artificial Sequence
  Description of Artificial Sequence: Synthetic peptide
SDIDITFLKKDAPYIVGDVVQEGVL

SEQ ID NO: 15411 - protein, 25 aa, Artificial Sequence
  Description of Artificial Sequence: Synthetic peptide
VHVMSKHTDFSSEIIGYKAIDGGVT

SEQ ID NO: 15412 - protein, 25 aa, Artificial Sequence
  Description of Artificial Sequence: Synthetic peptide
DSMSYEDQDALFAYTKRNVIPTITQ

SEQ ID NO: 15413 - protein, 25 aa, Artificial Sequence
  Description of Artificial Sequence: Synthetic peptide
SYEDQDALFAYTKRNVIPTITQMNL

SEQ ID NO: 15414 - protein, 25 aa, Artificial Sequence
  Description of Artificial Sequence: Synthetic peptide
MSYEDQDALFAYTKRNVIPTITQMN

SEQ ID NO: 15415 - protein, 25 aa, Artificial Sequence
  Description of Artificial Sequence: Synthetic peptide
SMSYEDQDALFAYTKRNVIPTITQM

SEQ ID NO: 15416 - protein, 25 aa, Artificial Sequence
  Description of Artificial Sequence: Synthetic peptide
SSEIIGYKAIDGGVTRDIASTDTCF

SEQ ID NO: 15417 - protein, 25 aa, Artificial Sequence
  Description of Artificial Sequence: Synthetic peptide
ISNEKQEILGTVSWNLREMLAHAEE

SEQ ID NO: 15418 - protein, 25 aa, Artificial Sequence
  Description of Artificial Sequence: Synthetic peptide
SIISNEKQEILGTVSWNLREMLAHA

SEQ ID NO: 15419 - protein, 25 aa, Artificial Sequence
  Description of Artificial Sequence: Synthetic peptide
IISNEKQEILGTVSWNLREMLAHAE

SEQ ID NO: 15420 - protein, 25 aa, Artificial Sequence
  Description of Artificial Sequence: Synthetic peptide
AEVAVKMFDAYVNTFSSTFNVPMEK

SEQ ID NO: 15421 - protein, 25 aa, Artificial Sequence
  Description of Artificial Sequence: Synthetic peptide
LAYYNTTKGGRFVLALLSDLQDLKW

SEQ ID NO: 15422 - protein, 25 aa, Artificial Sequence
  Description of Artificial Sequence: Synthetic peptide
ALAYYNTTKGGRFVLALLSDLQDLK

SEQ ID NO: 15423 - protein, 25 aa, Artificial Sequence
  Description of Artificial Sequence: Synthetic peptide
VYSVIYLYLTFYLTNDVSFLAHIQW

SEQ ID NO: 15424 - protein, 25 aa, Artificial Sequence
  Description of Artificial Sequence: Synthetic peptide
ANNTKGSLPINVIVFDGKSKCEESS

SEQ ID NO: 15425 - protein, 25 aa, Artificial Sequence
  Description of Artificial Sequence: Synthetic peptide
NNTKGSLPINVIVFDGKSKCEESSA

SEQ ID NO: 15426 - protein, 25 aa, Artificial Sequence
  Description of Artificial Sequence: Synthetic peptide
VTCGTTTLNGLWLDDVVYCPRHVIC

SEQ ID NO: 15427 - protein, 25 aa, Artificial Sequence
  Description of Artificial Sequence: Synthetic peptide
EGNFYGPFVDRQTAQAAGTDTTITV

SEQ ID NO: 15428 - protein, 25 aa, Artificial Sequence
  Description of Artificial Sequence: Synthetic peptide
YGPFVDRQTAQAAGTDTTITVNVLA

SEQ ID NO: 15429 - protein, 25 aa, Artificial Sequence
  Description of Artificial Sequence: Synthetic peptide
NFYGPFVDRQTAQAAGTDTTITVNV

SEQ ID NO: 15430 - protein, 25 aa, Artificial Sequence
  Description of Artificial Sequence: Synthetic peptide
GNFYGPFVDRQTAQAAGTDTTITVN

SEQ ID NO: 15431 - protein, 25 aa, Artificial Sequence
  Description of Artificial Sequence: Synthetic peptide
FYGPFVDRQTAQAAGTDTTITVNVL

SEQ ID NO: 15432 - protein, 25 aa, Artificial Sequence
  Description of Artificial Sequence: Synthetic peptide
LEGNFYGPFVDRQTAQAAGTDTTIT

SEQ ID NO: 15433 - protein, 25 aa, Artificial Sequence
  Description of Artificial Sequence: Synthetic peptide
LNLEEAARYMRSLKVPATVSVSSPD

SEQ ID NO: 15434 - protein, 25 aa, Artificial Sequence
  Description of Artificial Sequence: Synthetic peptide
HGLNLEEAARYMRSLKVPATVSVSS

SEQ ID NO: 15435 - protein, 25 aa, Artificial Sequence
  Description of Artificial Sequence: Synthetic peptide
NLEEAARYMRSLKVPATVSVSSPDA

SEQ ID NO: 15436 - protein, 25 aa, Artificial Sequence
  Description of Artificial Sequence: Synthetic peptide
GLNLEEAARYMRSLKVPATVSVSSP

SEQ ID NO: 15437 - protein, 25 aa, Artificial Sequence
  Description of Artificial Sequence: Synthetic peptide
LEEAARYMRSLKVPATVSVSSPDAV

SEQ ID NO: 15438 - protein, 25 aa, Artificial Sequence
  Description of Artificial Sequence: Synthetic peptide
THGLNLEEAARYMRSLKVPATVSVS

SEQ ID NO: 15439 - protein, 25 aa, Artificial Sequence
  Description of Artificial Sequence: Synthetic peptide
KDNSYFTEQPIDLVPNQPYPNASFD

SEQ ID NO: 15440 - protein, 25 aa, Artificial Sequence
  Description of Artificial Sequence: Synthetic peptide
DNSYFTEQPIDLVPNQPYPNASFDN

SEQ ID NO: 15441 - protein, 25 aa, Artificial Sequence
  Description of Artificial Sequence: Synthetic peptide
SLPINVIVFDGKSKCEESSAKSASV

SEQ ID NO: 15442 - protein, 25 aa, Artificial Sequence
  Description of Artificial Sequence: Synthetic peptide
LPINVIVFDGKSKCEESSAKSASVY

SEQ ID NO: 15443 - protein, 25 aa, Artificial Sequence
  Description of Artificial Sequence: Synthetic peptide
LKGGKIVNNWLKQLIKVTLVFLFVA

SEQ ID NO: 15444 - protein, 25 aa, Artificial Sequence
  Description of Artificial Sequence: Synthetic peptide
TTIVNGVRRSFYVYANGGKGFCKLH

SEQ ID NO: 15445 - protein, 25 aa, Artificial Sequence
  Description of Artificial Sequence: Synthetic peptide
GVRRSFYVYANGGKGFCKLHNWNCV

SEQ ID NO: 15446 - protein, 25 aa, Artificial Sequence
  Description of Artificial Sequence: Synthetic peptide
IVNGVRRSFYVYANGGKGFCKLHNW

SEQ ID NO: 15447 - protein, 25 aa, Artificial Sequence
  Description of Artificial Sequence: Synthetic peptide
NGVRRSFYVYANGGKGFCKLHNWNC

SEQ ID NO: 15448 - protein, 25 aa, Artificial Sequence
  Description of Artificial Sequence: Synthetic peptide
VNGVRRSFYVYANGGKGFCKLHNWN

SEQ ID NO: 15449 - protein, 25 aa, Artificial Sequence
  Description of Artificial Sequence: Synthetic peptide
TIVNGVRRSFYVYANGGKGFCKLHN

SEQ ID NO: 15450 - protein, 25 aa, Artificial Sequence
  Description of Artificial Sequence: Synthetic peptide
ARAGKASCTLSEQLDFIDTKRGVYC

SEQ ID NO: 15451 - protein, 25 aa, Artificial Sequence
  Description of Artificial Sequence: Synthetic peptide
RAGKASCTLSEQLDFIDTKRGVYCC

SEQ ID NO: 15452 - protein, 25 aa, Artificial Sequence
  Description of Artificial Sequence: Synthetic peptide
LARAGKASCTLSEQLDFIDTKRGVY

SEQ ID NO: 15453 - protein, 25 aa, Artificial Sequence
  Description of Artificial Sequence: Synthetic peptide
TKKAGGTTEMLAKALRKVPTDNYIT

SEQ ID NO: 15454 - protein, 25 aa, Artificial Sequence
  Description of Artificial Sequence: Synthetic peptide
KAGGTTEMLAKALRKVPTDNYITTY

SEQ ID NO: 15455 - protein, 25 aa, Artificial Sequence
  Description of Artificial Sequence: Synthetic peptide
VIPTKKAGGTTEMLAKALRKVPTDN

SEQ ID NO: 15456 - protein, 25 aa, Artificial Sequence
  Description of Artificial Sequence: Synthetic peptide
IPTKKAGGTTEMLAKALRKVPTDNY

SEQ ID NO: 15457 - protein, 25 aa, Artificial Sequence
  Description of Artificial Sequence: Synthetic peptide
KKAGGTTEMLAKALRKVPTDNYITT

SEQ ID NO: 15458 - protein, 25 aa, Artificial Sequence
  Description of Artificial Sequence: Synthetic peptide
AGGTTEMLAKALRKVPTDNYITTYP

SEQ ID NO: 15459 - protein, 25 aa, Artificial Sequence
  Description of Artificial Sequence: Synthetic peptide
PTKKAGGTTEMLAKALRKVPTDNYI

SEQ ID NO: 15460 - protein, 25 aa, Artificial Sequence
  Description of Artificial Sequence: Synthetic peptide
LLTLQQIELKFNPPALQDAYYRARA

SEQ ID NO: 15461 - protein, 25 aa, Artificial Sequence
  Description of Artificial Sequence: Synthetic peptide
QKIAEIPKEEVKPFITESKPSVEQR

SEQ ID NO: 15462 - protein, 25 aa, Artificial Sequence
  Description of Artificial Sequence: Synthetic peptide
YFYTSKTTVASLINTLNDLNETLVT

SEQ ID NO: 15463 - protein, 25 aa, Artificial Sequence
  Description of Artificial Sequence: Synthetic peptide
GDIILKPANNSLKITEEVGHTDLMA

SEQ ID NO: 15464 - protein, 25 aa, Artificial Sequence
  Description of Artificial Sequence: Synthetic peptide
SGKPVPYCYDTNVLEGSVAYESLRP

SEQ ID NO: 15465 - protein, 25 aa, Artificial Sequence
  Description of Artificial Sequence: Synthetic peptide
VNSFSGYLKLTDNVYIKNADIVEEA

SEQ ID NO: 15466 - protein, 25 aa, Artificial Sequence
  Description of Artificial Sequence: Synthetic peptide
NSFSGYLKLTDNVYIKNADIVEEAK

SEQ ID NO: 15467 - protein, 25 aa, Artificial Sequence
  Description of Artificial Sequence: Synthetic peptide
SVVLLSVLQQLRVESSSKLWAQCVQ

SEQ ID NO: 15468 - protein, 25 aa, Artificial Sequence
  Description of Artificial Sequence: Synthetic peptide
PPQTSITSAVLQSGFRKMAFPSGKV

SEQ ID NO: 15469 - protein, 25 aa, Artificial Sequence
  Description of Artificial Sequence: Synthetic peptide
GLVEVEKGVLPQLEQPYVFIKRSDA

SEQ ID NO: 15470 - protein, 25 aa, Artificial Sequence
  Description of Artificial Sequence: Synthetic peptide
CGLVEVEKGVLPQLEQPYVFIKRSD

SEQ ID NO: 15471 - protein, 25 aa, Artificial Sequence
  Description of Artificial Sequence: Synthetic peptide
LVEVEKGVLPQLEQPYVFIKRSDAR

SEQ ID NO: 15472 - protein, 25 aa, Artificial Sequence
  Description of Artificial Sequence: Synthetic peptide
TCGLVEVEKGVLPQLEQPYVFIKRS

SEQ ID NO: 15473 - protein, 25 aa, Artificial Sequence
  Description of Artificial Sequence: Synthetic peptide
SLPVLQVRDVLVRGFGDSVEEVLSE

SEQ ID NO: 15474 - protein, 25 aa, Artificial Sequence
  Description of Artificial Sequence: Synthetic peptide
LPVLQVRDVLVRGFGDSVEEVLSEA

SEQ ID NO: 15475 - protein, 25 aa, Artificial Sequence
  Description of Artificial Sequence: Synthetic peptide
RSFYVYANGGKGFCKLHNWNCVNCD

SEQ ID NO: 15476 - protein, 25 aa, Artificial Sequence
  Description of Artificial Sequence: Synthetic peptide
VTRCLNRVCTNYMPYFFTLLLQLCT

SEQ ID NO: 15477 - protein, 25 aa, Artificial Sequence
  Description of Artificial Sequence: Synthetic peptide
QQIELKFNPPALQDAYYRARAGEAA

SEQ ID NO: 15478 - protein, 25 aa, Artificial Sequence
  Description of Artificial Sequence: Synthetic peptide
LQQIELKFNPPALQDAYYRARAGEA

SEQ ID NO: 15479 - protein, 25 aa, Artificial Sequence
  Description of Artificial Sequence: Synthetic peptide
LSVLQQLRVESSSKLWAQCVQLHND

SEQ ID NO: 15480 - protein, 25 aa, Artificial Sequence
  Description of Artificial Sequence: Synthetic peptide
LLSVLQQLRVESSSKLWAQCVQLHN

SEQ ID NO: 15481 - protein, 25 aa, Artificial Sequence
  Description of Artificial Sequence: Synthetic peptide
KKSLNVAKSEFDRDAAMQRKLEKMA

SEQ ID NO: 15482 - protein, 25 aa, Artificial Sequence
  Description of Artificial Sequence: Synthetic peptide
KSLNVAKSEFDRDAAMQRKLEKMAD

SEQ ID NO: 15483 - protein, 25 aa, Artificial Sequence
  Description of Artificial Sequence: Synthetic peptide
KHSSGVTRELMRELNGGAYTRYVDN

SEQ ID NO: 15484 - protein, 25 aa, Artificial Sequence
  Description of Artificial Sequence: Synthetic peptide
NTKHSSGVTRELMRELNGGAYTRYV

SEQ ID NO: 15485 - protein, 25 aa, Artificial Sequence
  Description of Artificial Sequence: Synthetic peptide
TKHSSGVTRELMRELNGGAYTRYVD

SEQ ID NO: 15486 - protein, 25 aa, Artificial Sequence
  Description of Artificial Sequence: Synthetic peptide
TERSEKSYELQTPFEIKLAKKFDTF

SEQ ID NO: 15487 - protein, 25 aa, Artificial Sequence
  Description of Artificial Sequence: Synthetic peptide
EAARVVRSIFSRTLETAQNSVRVLQ

SEQ ID NO: 15488 - protein, 25 aa, Artificial Sequence
  Description of Artificial Sequence: Synthetic peptide
EILGTVSWNLREMLAHAEETRKLMP

SEQ ID NO: 15489 - protein, 25 aa, Artificial Sequence
  Description of Artificial Sequence: Synthetic peptide
KQEILGTVSWNLREMLAHAEETRKL

SEQ ID NO: 15490 - protein, 25 aa, Artificial Sequence
  Description of Artificial Sequence: Synthetic peptide
QEILGTVSWNLREMLAHAEETRKLM

SEQ ID NO: 15491 - protein, 25 aa, Artificial Sequence
  Description of Artificial Sequence: Synthetic peptide
ILGTVSWNLREMLAHAEETRKLMPV

SEQ ID NO: 15492 - protein, 25 aa, Artificial Sequence
  Description of Artificial Sequence: Synthetic peptide
EKQEILGTVSWNLREMLAHAEETRK

SEQ ID NO: 15493 - protein, 25 aa, Artificial Sequence
  Description of Artificial Sequence: Synthetic peptide
GARFYFYTSKTTVASLINTLNDLNE

SEQ ID NO: 15494 - protein, 25 aa, Artificial Sequence
  Description of Artificial Sequence: Synthetic peptide
KKLKKSLNVAKSEFDRDAAMQRKLE

SEQ ID NO: 15495 - protein, 25 aa, Artificial Sequence
  Description of Artificial Sequence: Synthetic peptide
LKKLKKSLNVAKSEFDRDAAMQRKL

SEQ ID NO: 15496 - protein, 25 aa, Artificial Sequence
  Description of Artificial Sequence: Synthetic peptide
DVFHLYLQYIRKLHDELTGHMLDMY

SEQ ID NO: 15497 - protein, 25 aa, Artificial Sequence
  Description of Artificial Sequence: Synthetic peptide
VTFFPDLNGDVVAIDYKHYTPSFKK

SEQ ID NO: 15498 - protein, 25 aa, Artificial Sequence
  Description of Artificial Sequence: Synthetic peptide
HEIAWYTERSEKSYELQTPFEIKLA

SEQ ID NO: 15499 - protein, 25 aa, Artificial Sequence
  Description of Artificial Sequence: Synthetic peptide
TEVNEFACVVADAVIKTLQPVSELL

SEQ ID NO: 15500 - protein, 25 aa, Artificial Sequence
  Description of Artificial Sequence: Synthetic peptide
LLNKEMYLKLRSDVLLPLTQYNRYL

SEQ ID NO: 15501 - protein, 25 aa, Artificial Sequence
  Description of Artificial Sequence: Synthetic peptide
TFLLNKEMYLKLRSDVLLPLTQYNR

SEQ ID NO: 15502 - protein, 25 aa, Artificial Sequence
  Description of Artificial Sequence: Synthetic peptide
FLLNKEMYLKLRSDVLLPLTQYNRY

SEQ ID NO: 15503 - protein, 25 aa, Artificial Sequence
  Description of Artificial Sequence: Synthetic peptide
PNPKGFCDLKGKYVQIPTTCANDPV

SEQ ID NO: 15504 - protein, 25 aa, Artificial Sequence
  Description of Artificial Sequence: Synthetic peptide
TYYLFDESGEFKLASHMYCSFYPPD

SEQ ID NO: 15505 - protein, 25 aa, Artificial Sequence
  Description of Artificial Sequence: Synthetic peptide
GVDAVNLLTNMFTPLIQPIGALDIS

SEQ ID NO: 15506 - protein, 25 aa, Artificial Sequence
  Description of Artificial Sequence: Synthetic peptide
CGVDAVNLLTNMFTPLIQPIGALDI

SEQ ID NO: 15507 - protein, 25 aa, Artificial Sequence
  Description of Artificial Sequence: Synthetic peptide
FCGVDAVNLLTNMFTPLIQPIGALD

SEQ ID NO: 15508 - protein, 25 aa, Artificial Sequence
  Description of Artificial Sequence: Synthetic peptide
DAVNLLTNMFTPLIQPIGALDISAS

SEQ ID NO: 15509 - protein, 25 aa, Artificial Sequence
  Description of Artificial Sequence: Synthetic peptide
VDAVNLLTNMFTPLIQPIGALDISA

SEQ ID NO: 15510 - protein, 25 aa, Artificial Sequence
  Description of Artificial Sequence: Synthetic peptide
GAKLKALNLGETFVTHSKGLYRKCV

SEQ ID NO: 15511 - protein, 25 aa, Artificial Sequence
  Description of Artificial Sequence: Synthetic peptide
GGAKLKALNLGETFVTHSKGLYRKC

SEQ ID NO: 15512 - protein, 25 aa, Artificial Sequence
  Description of Artificial Sequence: Synthetic peptide
IELKFNPPALQDAYYRARAGEAANF

SEQ ID NO: 15513 - protein, 25 aa, Artificial Sequence
  Description of Artificial Sequence: Synthetic peptide
QIELKFNPPALQDAYYRARAGEAAN

SEQ ID NO: 15514 - protein, 25 aa, Artificial Sequence
  Description of Artificial Sequence: Synthetic peptide
SCNNYMLTYNKVENMTPRDLGACID

SEQ ID NO: 15515 - protein, 25 aa, Artificial Sequence
  Description of Artificial Sequence: Synthetic peptide
AFEKMVSLLSVLLSMQGAVDINKLC

SEQ ID NO: 15516 - protein, 25 aa, Artificial Sequence
  Description of Artificial Sequence: Synthetic peptide
EAFEKMVSLLSVLLSMQGAVDINKL

SEQ ID NO: 15517 - protein, 25 aa, Artificial Sequence
  Description of Artificial Sequence: Synthetic peptide
FEKMVSLLSVLLSMQGAVDINKLCE

SEQ ID NO: 15518 - protein, 25 aa, Artificial Sequence
  Description of Artificial Sequence: Synthetic peptide
QEGVVDYGARFYFYTSKTTVASLIN

SEQ ID NO: 15519 - protein, 25 aa, Artificial Sequence
  Description of Artificial Sequence: Synthetic peptide
DTIANYAKPFLNKVVSTTTNIVTRC

SEQ ID NO: 15520 - protein, 25 aa, Artificial Sequence
  Description of Artificial Sequence: Synthetic peptide
WDTIANYAKPFLNKVVSTTTNIVTR

SEQ ID NO: 15521 - protein, 25 aa, Artificial Sequence
  Description of Artificial Sequence: Synthetic peptide
GTGQAITVTPEANMDQESFGGASCC

SEQ ID NO: 15522 - protein, 25 aa, Artificial Sequence
  Description of Artificial Sequence: Synthetic peptide
AQEAYEQAVANGDSEVVLKKLKKSL

SEQ ID NO: 15523 - protein, 25 aa, Artificial Sequence
  Description of Artificial Sequence: Synthetic peptide
RYMSALNHTKKWKYPQVNGLTSIKW

SEQ ID NO: 15524 - protein, 25 aa, Artificial Sequence
  Description of Artificial Sequence: Synthetic peptide
VLECNVKTTEVVGDIILKPANNSLK

SEQ ID NO: 15525 - protein, 25 aa, Artificial Sequence
  Description of Artificial Sequence: Synthetic peptide
LECNVKTTEVVGDIILKPANNSLKI

SEQ ID NO: 15526 - protein, 25 aa, Artificial Sequence
  Description of Artificial Sequence: Synthetic peptide
GRYMSALNHTKKWKYPQVNGLTSIK

SEQ ID NO: 15527 - protein, 25 aa, Artificial Sequence
  Description of Artificial Sequence: Synthetic peptide
SEDMLNPNYEDLLIRKSNHNFLVQA

SEQ ID NO: 15528 - protein, 25 aa, Artificial Sequence
  Description of Artificial Sequence: Synthetic peptide
GDVVAIDYKHYTPSFKKGAKLLHKP

SEQ ID NO: 15529 - protein, 25 aa, Artificial Sequence
  Description of Artificial Sequence: Synthetic peptide
CVNCDTFCAGSTFISDEVARDLSLQ

SEQ ID NO: 15530 - protein, 25 aa, Artificial Sequence
  Description of Artificial Sequence: Synthetic peptide
YGARFYFYTSKTTVASLINTLNDLN

SEQ ID NO: 15531 - protein, 25 aa, Artificial Sequence
  Description of Artificial Sequence: Synthetic peptide
SSFLEMKSEKQVEQKIAEIPKEEVK

SEQ ID NO: 15532 - protein, 25 aa, Artificial Sequence
  Description of Artificial Sequence: Synthetic peptide
VTCAKEIKESVQTFFKLVNKFLALC

SEQ ID NO: 15533 - protein, 25 aa, Artificial Sequence
  Description of Artificial Sequence: Synthetic peptide
TCAKEIKESVQTFFKLVNKFLALCA

SEQ ID NO: 15534 - protein, 25 aa, Artificial Sequence
  Description of Artificial Sequence: Synthetic peptide
EAYEQAVANGDSEVVLKKLKKSLNV

SEQ ID NO: 15535 - protein, 25 aa, Artificial Sequence
  Description of Artificial Sequence: Synthetic peptide
YEQAVANGDSEVVLKKLKKSLNVAK

SEQ ID NO: 15536 - protein, 25 aa, Artificial Sequence
  Description of Artificial Sequence: Synthetic peptide
AYEQAVANGDSEVVLKKLKKSLNVA

SEQ ID NO: 15537 - protein, 25 aa, Artificial Sequence
  Description of Artificial Sequence: Synthetic peptide
QYELKHGTFTCASEYTGNYQCGHYK

SEQ ID NO: 15538 - protein, 25 aa, Artificial Sequence
  Description of Artificial Sequence: Synthetic peptide
ELKHGTFTCASEYTGNYQCGHYKHI

SEQ ID NO: 15539 - protein, 25 aa, Artificial Sequence
  Description of Artificial Sequence: Synthetic peptide
YELKHGTFTCASEYTGNYQCGHYKH

SEQ ID NO: 15540 - protein, 25 aa, Artificial Sequence
  Description of Artificial Sequence: Synthetic peptide
LKHGTFTCASEYTGNYQCGHYKHIT

SEQ ID NO: 15541 - protein, 25 aa, Artificial Sequence
  Description of Artificial Sequence: Synthetic peptide
INAQVAKSHNIALIWNVKDFMSLSE

SEQ ID NO: 15542 - protein, 25 aa, Artificial Sequence
  Description of Artificial Sequence: Synthetic peptide
AQNSVRVLQKAAITILDGISQYSLR

SEQ ID NO: 15543 - protein, 25 aa, Artificial Sequence
  Description of Artificial Sequence: Synthetic peptide
QMAPISAMVRMYIFFASFYYVWKSY

SEQ ID NO: 15544 - protein, 25 aa, Artificial Sequence
  Description of Artificial Sequence: Synthetic peptide
MAPISAMVRMYIFFASFYYVWKSYV

SEQ ID NO: 15545 - protein, 25 aa, Artificial Sequence
  Description of Artificial Sequence: Synthetic peptide
LIINLVQMAPISAMVRMYIFFASFY

SEQ ID NO: 15546 - protein, 25 aa, Artificial Sequence
  Description of Artificial Sequence: Synthetic peptide
VQMAPISAMVRMYIFFASFYYVWKS

SEQ ID NO: 15547 - protein, 25 aa, Artificial Sequence
  Description of Artificial Sequence: Synthetic peptide
NLVQMAPISAMVRMYIFFASFYYVW

SEQ ID NO: 15548 - protein, 25 aa, Artificial Sequence
  Description of Artificial Sequence: Synthetic peptide
INLVQMAPISAMVRMYIFFASFYYV

SEQ ID NO: 15549 - protein, 25 aa, Artificial Sequence
  Description of Artificial Sequence: Synthetic peptide
IINLVQMAPISAMVRMYIFFASFYY

SEQ ID NO: 15550 - protein, 25 aa, Artificial Sequence
  Description of Artificial Sequence: Synthetic peptide
WLIINLVQMAPISAMVRMYIFFASF

SEQ ID NO: 15551 - protein, 25 aa, Artificial Sequence
  Description of Artificial Sequence: Synthetic peptide
LVQMAPISAMVRMYIFFASFYYVWK

SEQ ID NO: 15552 - protein, 25 aa, Artificial Sequence
  Description of Artificial Sequence: Synthetic peptide
TGDLQPLEQPTSEAVEAPLVGTPVC

SEQ ID NO: 15553 - protein, 25 aa, Artificial Sequence
  Description of Artificial Sequence: Synthetic peptide
LLEDEFTPFDVVRQCSGVTFQSAVK

SEQ ID NO: 15554 - protein, 25 aa, Artificial Sequence
  Description of Artificial Sequence: Synthetic peptide
ALLEDEFTPFDVVRQCSGVTFQSAV

SEQ ID NO: 15555 - protein, 25 aa, Artificial Sequence
  Description of Artificial Sequence: Synthetic peptide
LEDEFTPFDVVRQCSGVTFQSAVKR

SEQ ID NO: 15556 - protein, 25 aa, Artificial Sequence
  Description of Artificial Sequence: Synthetic peptide
SALLEDEFTPFDVVRQCSGVTFQSA

SEQ ID NO: 15557 - protein, 25 aa, Artificial Sequence
  Description of Artificial Sequence: Synthetic peptide
SCKRVLNVVCKTCGQQQTTLKGVEA

SEQ ID NO: 15558 - protein, 25 aa, Artificial Sequence
  Description of Artificial Sequence: Synthetic peptide
LNHTKKWKYPQVNGLTSIKWADNNC

SEQ ID NO: 15559 - protein, 25 aa, Artificial Sequence
  Description of Artificial Sequence: Synthetic peptide
NHTKKWKYPQVNGLTSIKWADNNCY

SEQ ID NO: 15560 - protein, 25 aa, Artificial Sequence
  Description of Artificial Sequence: Synthetic peptide
ALNHTKKWKYPQVNGLTSIKWADNN

SEQ ID NO: 15561 - protein, 25 aa, Artificial Sequence
  Description of Artificial Sequence: Synthetic peptide
ASWVMRIMTWLDMVDTSLSGFKLKD

SEQ ID NO: 15562 - protein, 25 aa, Artificial Sequence
  Description of Artificial Sequence: Synthetic peptide
PASWVMRIMTWLDMVDTSLSGFKLK

SEQ ID NO: 15563 - protein, 25 aa, Artificial Sequence
  Description of Artificial Sequence: Synthetic peptide
QVEQKIAEIPKEEVKPFITESKPSV

SEQ ID NO: 15564 - protein, 25 aa, Artificial Sequence
  Description of Artificial Sequence: Synthetic peptide
VEQKIAEIPKEEVKPFITESKPSVE

SEQ ID NO: 15565 - protein, 25 aa, Artificial Sequence
  Description of Artificial Sequence: Synthetic peptide
KQVEQKIAEIPKEEVKPFITESKPS

SEQ ID NO: 15566 - protein, 25 aa, Artificial Sequence
  Description of Artificial Sequence: Synthetic peptide
DWLEEKFKEGVEFLRDGWEIVKFIS

SEQ ID NO: 15567 - protein, 25 aa, Artificial Sequence
  Description of Artificial Sequence: Synthetic peptide
PVLDWLEEKFKEGVEFLRDGWEIVK

SEQ ID NO: 15568 - protein, 25 aa, Artificial Sequence
  Description of Artificial Sequence: Synthetic peptide
KPVLDWLEEKFKEGVEFLRDGWEIV

SEQ ID NO: 15569 - protein, 25 aa, Artificial Sequence
  Description of Artificial Sequence: Synthetic peptide
LDWLEEKFKEGVEFLRDGWEIVKFI

SEQ ID NO: 15570 - protein, 25 aa, Artificial Sequence
  Description of Artificial Sequence: Synthetic peptide
VLDWLEEKFKEGVEFLRDGWEIVKF

SEQ ID NO: 15571 - protein, 25 aa, Artificial Sequence
  Description of Artificial Sequence: Synthetic peptide
EHFIETISLAGSYKDWSYSGQSTQL

SEQ ID NO: 15572 - protein, 25 aa, Artificial Sequence
  Description of Artificial Sequence: Synthetic peptide
HFIETISLAGSYKDWSYSGQSTQLG

SEQ ID NO: 15573 - protein, 25 aa, Artificial Sequence
  Description of Artificial Sequence: Synthetic peptide
EEHFIETISLAGSYKDWSYSGQSTQ

SEQ ID NO: 15574 - protein, 25 aa, Artificial Sequence
  Description of Artificial Sequence: Synthetic peptide
ADIVEEAKKVKPTVVVNAANVYLKH

SEQ ID NO: 15575 - protein, 25 aa, Artificial Sequence
  Description of Artificial Sequence: Synthetic peptide
ECNVKTTEVVGDIILKPANNSLKIT

SEQ ID NO: 15576 - protein, 25 aa, Artificial Sequence
  Description of Artificial Sequence: Synthetic peptide
NVKTTEVVGDIILKPANNSLKITEE

SEQ ID NO: 15577 - protein, 25 aa, Artificial Sequence
  Description of Artificial Sequence: Synthetic peptide
CNVKTTEVVGDIILKPANNSLKITE

SEQ ID NO: 15578 - protein, 25 aa, Artificial Sequence
  Description of Artificial Sequence: Synthetic peptide
IDTKRGVYCCREHEHEIAWYTERSE

SEQ ID NO: 15579 - protein, 25 aa, Artificial Sequence
  Description of Artificial Sequence: Synthetic peptide
FIDTKRGVYCCREHEHEIAWYTERS

SEQ ID NO: 15580 - protein, 25 aa, Artificial Sequence
  Description of Artificial Sequence: Synthetic peptide
LDFIDTKRGVYCCREHEHEIAWYTE

SEQ ID NO: 15581 - protein, 25 aa, Artificial Sequence
  Description of Artificial Sequence: Synthetic peptide
DFIDTKRGVYCCREHEHEIAWYTER

SEQ ID NO: 15582 - protein, 25 aa, Artificial Sequence
  Description of Artificial Sequence: Synthetic peptide
QLDFIDTKRGVYCCREHEHEIAWYT

SEQ ID NO: 15583 - protein, 25 aa, Artificial Sequence
  Description of Artificial Sequence: Synthetic peptide
RIMTWLDMVDTSLSGFKLKDCVMYA

SEQ ID NO: 15584 - protein, 25 aa, Artificial Sequence
  Description of Artificial Sequence: Synthetic peptide
IMTWLDMVDTSLSGFKLKDCVMYAS

SEQ ID NO: 15585 - protein, 25 aa, Artificial Sequence
  Description of Artificial Sequence: Synthetic peptide
MRIMTWLDMVDTSLSGFKLKDCVMY

SEQ ID NO: 15586 - protein, 25 aa, Artificial Sequence
  Description of Artificial Sequence: Synthetic peptide
YRKCVKSREETGLLMPLKAPKEIIF

SEQ ID NO: 15587 - protein, 25 aa, Artificial Sequence
  Description of Artificial Sequence: Synthetic peptide
KCVKSREETGLLMPLKAPKEIIFLE

SEQ ID NO: 15588 - protein, 25 aa, Artificial Sequence
  Description of Artificial Sequence: Synthetic peptide
GLYRKCVKSREETGLLMPLKAPKEI

SEQ ID NO: 15589 - protein, 25 aa, Artificial Sequence
  Description of Artificial Sequence: Synthetic peptide
CVKSREETGLLMPLKAPKEIIFLEG

SEQ ID NO: 15590 - protein, 25 aa, Artificial Sequence
  Description of Artificial Sequence: Synthetic peptide
RKCVKSREETGLLMPLKAPKEIIFL

SEQ ID NO: 15591 - protein, 25 aa, Artificial Sequence
  Description of Artificial Sequence: Synthetic peptide
LYRKCVKSREETGLLMPLKAPKEII

SEQ ID NO: 15592 - protein, 25 aa, Artificial Sequence
  Description of Artificial Sequence: Synthetic peptide
DYKAFKQIVESCGNFKVTKGKAKKG

SEQ ID NO: 15593 - protein, 25 aa, Artificial Sequence
  Description of Artificial Sequence: Synthetic peptide
YKAFKQIVESCGNFKVTKGKAKKGA

SEQ ID NO: 15594 - protein, 25 aa, Artificial Sequence
  Description of Artificial Sequence: Synthetic peptide
KAFKQIVESCGNFKVTKGKAKKGAW

SEQ ID NO: 15595 - protein, 25 aa, Artificial Sequence
  Description of Artificial Sequence: Synthetic peptide
FCAGSTFISDEVARDLSLQFKRPIN

SEQ ID NO: 15596 - protein, 25 aa, Artificial Sequence
  Description of Artificial Sequence: Synthetic peptide
DTFCAGSTFISDEVARDLSLQFKRP

SEQ ID NO: 15597 - protein, 25 aa, Artificial Sequence
  Description of Artificial Sequence: Synthetic peptide
TFCAGSTFISDEVARDLSLQFKRPI

SEQ ID NO: 15598 - protein, 25 aa, Artificial Sequence
  Description of Artificial Sequence: Synthetic peptide
INGLMLLEIKDTEKYCALAPNMMVT

SEQ ID NO: 15599 - protein, 25 aa, Artificial Sequence
  Description of Artificial Sequence: Synthetic peptide
NGLMLLEIKDTEKYCALAPNMMVTN

SEQ ID NO: 15600 - protein, 25 aa, Artificial Sequence
  Description of Artificial Sequence: Synthetic peptide
LNDNLLEILQKEKVNINIVGDFKLN

SEQ ID NO: 15601 - protein, 25 aa, Artificial Sequence
  Description of Artificial Sequence: Synthetic peptide
NLLEILQKEKVNINIVGDFKLNEEI

SEQ ID NO: 15602 - protein, 25 aa, Artificial Sequence
  Description of Artificial Sequence: Synthetic peptide
NDNLLEILQKEKVNINIVGDFKLNE

SEQ ID NO: 15603 - protein, 25 aa, Artificial Sequence
  Description of Artificial Sequence: Synthetic peptide
GLNDNLLEILQKEKVNINIVGDFKL

SEQ ID NO: 15604 - protein, 25 aa, Artificial Sequence
  Description of Artificial Sequence: Synthetic peptide
DNLLEILQKEKVNINIVGDFKLNEE

SEQ ID NO: 15605 - protein, 25 aa, Artificial Sequence
  Description of Artificial Sequence: Synthetic peptide
GPLSAQTGIAVLDMCASLKELLQNG

SEQ ID NO: 15606 - protein, 25 aa, Artificial Sequence
  Description of Artificial Sequence: Synthetic peptide
PLSAQTGIAVLDMCASLKELLQNGM

SEQ ID NO: 15607 - protein, 25 aa, Artificial Sequence
  Description of Artificial Sequence: Synthetic peptide
GADVTKIKPHNSHEGKTFYVLPNDD

SEQ ID NO: 15608 - protein, 25 aa, Artificial Sequence
  Description of Artificial Sequence: Synthetic peptide
TIANYAKPFLNKVVSTTTNIVTRCL

SEQ ID NO: 15609 - protein, 25 aa, Artificial Sequence
  Description of Artificial Sequence: Synthetic peptide
DMCASLKELLQNGMNGRTILGSALL

SEQ ID NO: 15610 - protein, 25 aa, Artificial Sequence
  Description of Artificial Sequence: Synthetic peptide
ATAQEAYEQAVANGDSEVVLKKLKK

SEQ ID NO: 15611 - protein, 25 aa, Artificial Sequence
  Description of Artificial Sequence: Synthetic peptide
FATAQEAYEQAVANGDSEVVLKKLK

SEQ ID NO: 15612 - protein, 25 aa, Artificial Sequence
  Description of Artificial Sequence: Synthetic peptide
YFCTCYFGLFCLLNRYFRLTLGVYD

SEQ ID NO: 15613 - protein, 25 aa, Artificial Sequence
  Description of Artificial Sequence: Synthetic peptide
GYFCTCYFGLFCLLNRYFRLTLGVY

SEQ ID NO: 15614 - protein, 25 aa, Artificial Sequence
  Description of Artificial Sequence: Synthetic peptide
TLLTKGTLEPEYFNSVCRLMKTIGP

SEQ ID NO: 15615 - protein, 25 aa, Artificial Sequence
  Description of Artificial Sequence: Synthetic peptide
EPLVDLPIGINITRFQTLLALHRSY

SEQ ID NO: 15616 - protein, 25 aa, Artificial Sequence
  Description of Artificial Sequence: Synthetic peptide
PLVDLPIGINITRFQTLLALHRSYL

SEQ ID NO: 15617 - protein, 25 aa, Artificial Sequence
  Description of Artificial Sequence: Synthetic peptide
NLWNTFTRLQSLENVAFNVVNKGHF

SEQ ID NO: 15618 - protein, 25 aa, Artificial Sequence
  Description of Artificial Sequence: Synthetic peptide
LAKRFKESPFELEDFIPMDSTVKNY

SEQ ID NO: 15619 - protein, 25 aa, Artificial Sequence
  Description of Artificial Sequence: Synthetic peptide
KRFKESPFELEDFIPMDSTVKNYFI

SEQ ID NO: 15620 - protein, 25 aa, Artificial Sequence
  Description of Artificial Sequence: Synthetic peptide
AKRFKESPFELEDFIPMDSTVKNYF

SEQ ID NO: 15621 - protein, 25 aa, Artificial Sequence
  Description of Artificial Sequence: Synthetic peptide
CFVDDIVKTDGTLMIERFVSLAIDA

SEQ ID NO: 15622 - protein, 25 aa, Artificial Sequence
  Description of Artificial Sequence: Synthetic peptide
LWNTFTRLQSLENVAFNVVNKGHFD

SEQ ID NO: 15623 - protein, 25 aa, Artificial Sequence
  Description of Artificial Sequence: Synthetic peptide
TFTRLQSLENVAFNVVNKGHFDGQQ

SEQ ID NO: 15624 - protein, 25 aa, Artificial Sequence
  Description of Artificial Sequence: Synthetic peptide
FKELLVYAADPAMHAASGNLLLDKR

SEQ ID NO: 15625 - protein, 25 aa, Artificial Sequence
  Description of Artificial Sequence: Synthetic peptide
LYALVYFLQSINFVRIIMRLWLCWK

SEQ ID NO: 15626 - protein, 25 aa, Artificial Sequence
  Description of Artificial Sequence: Synthetic peptide
VLPFNDGVYFASTEKSNIIRGWIFG

SEQ ID NO: 15627 - protein, 25 aa, Artificial Sequence
  Description of Artificial Sequence: Synthetic peptide
PVLPFNDGVYFASTEKSNIIRGWIF

SEQ ID NO: 15628 - protein, 25 aa, Artificial Sequence
  Description of Artificial Sequence: Synthetic peptide
LPFNDGVYFASTEKSNIIRGWIFGT

SEQ ID NO: 15629 - protein, 25 aa, Artificial Sequence
  Description of Artificial Sequence: Synthetic peptide
NPVLPFNDGVYFASTEKSNIIRGWI

SEQ ID NO: 15630 - protein, 25 aa, Artificial Sequence
  Description of Artificial Sequence: Synthetic peptide
DNPVLPFNDGVYFASTEKSNIIRGW

SEQ ID NO: 15631 - protein, 25 aa, Artificial Sequence
  Description of Artificial Sequence: Synthetic peptide
RDVDTDFVNEFYAYLRKHFSMMILS

SEQ ID NO: 15632 - protein, 25 aa, Artificial Sequence
  Description of Artificial Sequence: Synthetic peptide
SFPQSAPHGVVFLHVTYVPAQEKNF

SEQ ID NO: 15633 - protein, 25 aa, Artificial Sequence
  Description of Artificial Sequence: Synthetic peptide
LCEKALKYLPIDKCSRIIPARARVE

SEQ ID NO: 15634 - protein, 25 aa, Artificial Sequence
  Description of Artificial Sequence: Synthetic peptide
CEKALKYLPIDKCSRIIPARARVEC

SEQ ID NO: 15635 - protein, 25 aa, Artificial Sequence
  Description of Artificial Sequence: Synthetic peptide
AGDYILANTCTERLKLFAAETLKAT

SEQ ID NO: 15636 - protein, 25 aa, Artificial Sequence
  Description of Artificial Sequence: Synthetic peptide
ELLVYAADPAMHAASGNLLLDKRTT

SEQ ID NO: 15637 - protein, 25 aa, Artificial Sequence
  Description of Artificial Sequence: Synthetic peptide
KLQFTSLEIPRRNVATLQAENVTGL

SEQ ID NO: 15638 - protein, 25 aa, Artificial Sequence
  Description of Artificial Sequence: Synthetic peptide
TLEPEYFNSVCRLMKTIGPDMFLGT

SEQ ID NO: 15639 - protein, 25 aa, Artificial Sequence
  Description of Artificial Sequence: Synthetic peptide
KEIDRLNEVAKNLNESLIDLQELGK

SEQ ID NO: 15640 - protein, 25 aa, Artificial Sequence
  Description of Artificial Sequence: Synthetic peptide
AIATCDWTNAGDYILANTCTERLKL

SEQ ID NO: 15641 - protein, 25 aa, Artificial Sequence
  Description of Artificial Sequence: Synthetic peptide
IATCDWTNAGDYILANTCTERLKLF

SEQ ID NO: 15642 - protein, 25 aa, Artificial Sequence
  Description of Artificial Sequence: Synthetic peptide
ATCDWTNAGDYILANTCTERLKLFA

SEQ ID NO: 15643 - protein, 25 aa, Artificial Sequence
  Description of Artificial Sequence: Synthetic peptide
NAIATCDWTNAGDYILANTCTERLK

SEQ ID NO: 15644 - protein, 25 aa, Artificial Sequence
  Description of Artificial Sequence: Synthetic peptide
YNLWNTFTRLQSLENVAFNVVNKGH

SEQ ID NO: 15645 - protein, 25 aa, Artificial Sequence
  Description of Artificial Sequence: Synthetic peptide
SLWVYKQFDTYNLWNTFTRLQSLEN

SEQ ID NO: 15646 - protein, 25 aa, Artificial Sequence
  Description of Artificial Sequence: Synthetic peptide
GLPYGANKDGIIWVATEGALNTPKD

SEQ ID NO: 15647 - protein, 25 aa, Artificial Sequence
  Description of Artificial Sequence: Synthetic peptide
IDRLNEVAKNLNESLIDLQELGKYE

SEQ ID NO: 15648 - protein, 25 aa, Artificial Sequence
  Description of Artificial Sequence: Synthetic peptide
VDTVSALVYDNKLKAHKDKSAQCFK

SEQ ID NO: 15649 - protein, 25 aa, Artificial Sequence
  Description of Artificial Sequence: Synthetic peptide
PAEIVDTVSALVYDNKLKAHKDKSA

SEQ ID NO: 15650 - protein, 25 aa, Artificial Sequence
  Description of Artificial Sequence: Synthetic peptide
VYAADPAMHAASGNLLLDKRTTCFS

SEQ ID NO: 15651 - protein, 25 aa, Artificial Sequence
  Description of Artificial Sequence: Synthetic peptide
YAADPAMHAASGNLLLDKRTTCFSV

SEQ ID NO: 15652 - protein, 25 aa, Artificial Sequence
  Description of Artificial Sequence: Synthetic peptide
LHSSRLSFKELLVYAADPAMHAASG

SEQ ID NO: 15653 - protein, 25 aa, Artificial Sequence
  Description of Artificial Sequence: Synthetic peptide
HSSRLSFKELLVYAADPAMHAASGN

SEQ ID NO: 15654 - protein, 25 aa, Artificial Sequence
  Description of Artificial Sequence: Synthetic peptide
EVFNATRFASVYAWNRKRISNCVAD

SEQ ID NO: 15655 - protein, 25 aa, Artificial Sequence
  Description of Artificial Sequence: Synthetic peptide
FNATRFASVYAWNRKRISNCVADYS

SEQ ID NO: 15656 - protein, 25 aa, Artificial Sequence
  Description of Artificial Sequence: Synthetic peptide
VFNATRFASVYAWNRKRISNCVADY

SEQ ID NO: 15657 - protein, 25 aa, Artificial Sequence
  Description of Artificial Sequence: Synthetic peptide
NATRFASVYAWNRKRISNCVADYSV

SEQ ID NO: 15658 - protein, 25 aa, Artificial Sequence
  Description of Artificial Sequence: Synthetic peptide
LNGNWYDFGDFIQTTPGSGVPVVDS

SEQ ID NO: 15659 - protein, 25 aa, Artificial Sequence
  Description of Artificial Sequence: Synthetic peptide
DLNGNWYDFGDFIQTTPGSGVPVVD

SEQ ID NO: 15660 - protein, 25 aa, Artificial Sequence
  Description of Artificial Sequence: Synthetic peptide
NGNWYDFGDFIQTTPGSGVPVVDSY

SEQ ID NO: 15661 - protein, 25 aa, Artificial Sequence
  Description of Artificial Sequence: Synthetic peptide
TCCSLSHRFYRLANECAQVLSEMVM

SEQ ID NO: 15662 - protein, 25 aa, Artificial Sequence
  Description of Artificial Sequence: Synthetic peptide
CSLSHRFYRLANECAQVLSEMVMCG

SEQ ID NO: 15663 - protein, 25 aa, Artificial Sequence
  Description of Artificial Sequence: Synthetic peptide
CCSLSHRFYRLANECAQVLSEMVMC

SEQ ID NO: 15664 - protein, 25 aa, Artificial Sequence
  Description of Artificial Sequence: Synthetic peptide
PPPGDQFKHLIPLMYKGLPWNVVRI

SEQ ID NO: 15665 - protein, 25 aa, Artificial Sequence
  Description of Artificial Sequence: Synthetic peptide
DNQDLNGNWYDFGDFIQTTPGSGVP

SEQ ID NO: 15666 - protein, 25 aa, Artificial Sequence
  Description of Artificial Sequence: Synthetic peptide
SNFRVQPTESIVRFPNITNLCPFGE

SEQ ID NO: 15667 - protein, 25 aa, Artificial Sequence
  Description of Artificial Sequence: Synthetic peptide
HTTCCSLSHRFYRLANECAQVLSEM

SEQ ID NO: 15668 - protein, 25 aa, Artificial Sequence
  Description of Artificial Sequence: Synthetic peptide
TTCCSLSHRFYRLANECAQVLSEMV

SEQ ID NO: 15669 - protein, 25 aa, Artificial Sequence
  Description of Artificial Sequence: Synthetic peptide
LPYGANKDGIIWVATEGALNTPKDH

SEQ ID NO: 15670 - protein, 25 aa, Artificial Sequence
  Description of Artificial Sequence: Synthetic peptide
PYGANKDGIIWVATEGALNTPKDHI

SEQ ID NO: 15671 - protein, 25 aa, Artificial Sequence
  Description of Artificial Sequence: Synthetic peptide
YGANKDGIIWVATEGALNTPKDHIG

SEQ ID NO: 15672 - protein, 25 aa, Artificial Sequence
  Description of Artificial Sequence: Synthetic peptide
GANKDGIIWVATEGALNTPKDHIGT

SEQ ID NO: 15673 - protein, 25 aa, Artificial Sequence
  Description of Artificial Sequence: Synthetic peptide
RGTTTYKLNVGDYFVLTSHTVMPLS

SEQ ID NO: 15674 - protein, 25 aa, Artificial Sequence
  Description of Artificial Sequence: Synthetic peptide
GTTTYKLNVGDYFVLTSHTVMPLSA

SEQ ID NO: 15675 - protein, 25 aa, Artificial Sequence
  Description of Artificial Sequence: Synthetic peptide
LVTLAILTALRLCAYCCNIVNVSLV

SEQ ID NO: 15676 - protein, 25 aa, Artificial Sequence
  Description of Artificial Sequence: Synthetic peptide
VTLAILTALRLCAYCCNIVNVSLVK

SEQ ID NO: 15677 - protein, 25 aa, Artificial Sequence
  Description of Artificial Sequence: Synthetic peptide
LLQYGSFCTQLNRALTGIAVEQDKN

SEQ ID NO: 15678 - protein, 25 aa, Artificial Sequence
  Description of Artificial Sequence: Synthetic peptide
LQYGSFCTQLNRALTGIAVEQDKNT

SEQ ID NO: 15679 - protein, 25 aa, Artificial Sequence
  Description of Artificial Sequence: Synthetic peptide
DYPKCDRAMPNMLRIMASLVLARKH

SEQ ID NO: 15680 - protein, 25 aa, Artificial Sequence
  Description of Artificial Sequence: Synthetic peptide
ILANTCTERLKLFAAETLKATEETF

SEQ ID NO: 15681 - protein, 25 aa, Artificial Sequence
  Description of Artificial Sequence: Synthetic peptide
SGINASVVNIQKEIDRLNEVAKNLN

SEQ ID NO: 15682 - protein, 25 aa, Artificial Sequence
  Description of Artificial Sequence: Synthetic peptide
FKVSIWNLDYIINLIIKNLSKSLTE

SEQ ID NO: 15683 - protein, 25 aa, Artificial Sequence
  Description of Artificial Sequence: Synthetic peptide
VDGVVQQLPETYFTQSRNLQEFKPR

SEQ ID NO: 15684 - protein, 25 aa, Artificial Sequence
  Description of Artificial Sequence: Synthetic peptide
FLHVTYVPAQEKNFTTAPAICHDGK

SEQ ID NO: 15685 - protein, 25 aa, Artificial Sequence
  Description of Artificial Sequence: Synthetic peptide
DSNGTITVEELKKLLEQWNLVIGFL

SEQ ID NO: 15686 - protein, 25 aa, Artificial Sequence
  Description of Artificial Sequence: Synthetic peptide
ATRFASVYAWNRKRISNCVADYSVL

SEQ ID NO: 15687 - protein, 25 aa, Artificial Sequence
  Description of Artificial Sequence: Synthetic peptide
KLDDKDPNFKDQVILLNKHIDAYKT

SEQ ID NO: 15688 - protein, 25 aa, Artificial Sequence
  Description of Artificial Sequence: Synthetic peptide
DDKDPNFKDQVILLNKHIDAYKTFP

SEQ ID NO: 15689 - protein, 25 aa, Artificial Sequence
  Description of Artificial Sequence: Synthetic peptide
LDDKDPNFKDQVILLNKHIDAYKTF

SEQ ID NO: 15690 - protein, 25 aa, Artificial Sequence
  Description of Artificial Sequence: Synthetic peptide
DKDPNFKDQVILLNKHIDAYKTFPP

SEQ ID NO: 15691 - protein, 25 aa, Artificial Sequence
  Description of Artificial Sequence: Synthetic peptide
IKLDDKDPNFKDQVILLNKHIDAYK

SEQ ID NO: 15692 - protein, 25 aa, Artificial Sequence
  Description of Artificial Sequence: Synthetic peptide
VVQQLPETYFTQSRNLQEFKPRSQM

SEQ ID NO: 15693 - protein, 25 aa, Artificial Sequence
  Description of Artificial Sequence: Synthetic peptide
GVVQQLPETYFTQSRNLQEFKPRSQ

SEQ ID NO: 15694 - protein, 25 aa, Artificial Sequence
  Description of Artificial Sequence: Synthetic peptide
QQLPETYFTQSRNLQEFKPRSQMEI

SEQ ID NO: 15695 - protein, 25 aa, Artificial Sequence
  Description of Artificial Sequence: Synthetic peptide
VQQLPETYFTQSRNLQEFKPRSQME

SEQ ID NO: 15696 - protein, 25 aa, Artificial Sequence
  Description of Artificial Sequence: Synthetic peptide
QLPETYFTQSRNLQEFKPRSQMEID

SEQ ID NO: 15697 - protein, 25 aa, Artificial Sequence
  Description of Artificial Sequence: Synthetic peptide
LPETYFTQSRNLQEFKPRSQMEIDF

SEQ ID NO: 15698 - protein, 25 aa, Artificial Sequence
  Description of Artificial Sequence: Synthetic peptide
SNVTWFHAIHVSGTNGTKRFDNPVL

SEQ ID NO: 15699 - protein, 25 aa, Artificial Sequence
  Description of Artificial Sequence: Synthetic peptide
FSNVTWFHAIHVSGTNGTKRFDNPV

SEQ ID NO: 15700 - protein, 25 aa, Artificial Sequence
  Description of Artificial Sequence: Synthetic peptide
PFFSNVTWFHAIHVSGTNGTKRFDN

SEQ ID NO: 15701 - protein, 25 aa, Artificial Sequence
  Description of Artificial Sequence: Synthetic peptide
FFSNVTWFHAIHVSGTNGTKRFDNP

SEQ ID NO: 15702 - protein, 25 aa, Artificial Sequence
  Description of Artificial Sequence: Synthetic peptide
INASVVNIQKEIDRLNEVAKNLNES

SEQ ID NO: 15703 - protein, 25 aa, Artificial Sequence
  Description of Artificial Sequence: Synthetic peptide
GINASVVNIQKEIDRLNEVAKNLNE

SEQ ID NO: 15704 - protein, 25 aa, Artificial Sequence
  Description of Artificial Sequence: Synthetic peptide
IHADQLTPTWRVYSTGSNVFQTRAG

SEQ ID NO: 15705 - protein, 25 aa, Artificial Sequence
  Description of Artificial Sequence: Synthetic peptide
FVENPDILRVYANLGERVRQALLKT

SEQ ID NO: 15706 - protein, 25 aa, Artificial Sequence
  Description of Artificial Sequence: Synthetic peptide
DFVENPDILRVYANLGERVRQALLK

SEQ ID NO: 15707 - protein, 25 aa, Artificial Sequence
  Description of Artificial Sequence: Synthetic peptide
YDFVENPDILRVYANLGERVRQALL

SEQ ID NO: 15708 - protein, 25 aa, Artificial Sequence
  Description of Artificial Sequence: Synthetic peptide
QAWQPGVAMPNLYKMQRMLLEKCDL

SEQ ID NO: 15709 - protein, 25 aa, Artificial Sequence
  Description of Artificial Sequence: Synthetic peptide
SQAWQPGVAMPNLYKMQRMLLEKCD

SEQ ID NO: 15710 - protein, 25 aa, Artificial Sequence
  Description of Artificial Sequence: Synthetic peptide
LHVTYVPAQEKNFTTAPAICHDGKA

SEQ ID NO: 15711 - protein, 25 aa, Artificial Sequence
  Description of Artificial Sequence: Synthetic peptide
TFSNYQHEETIYNLLKDCPAVAKHD

SEQ ID NO: 15712 - protein, 25 aa, Artificial Sequence
  Description of Artificial Sequence: Synthetic peptide
FSNYQHEETIYNLLKDCPAVAKHDF

SEQ ID NO: 15713 - protein, 25 aa, Artificial Sequence
  Description of Artificial Sequence: Synthetic peptide
VAMPNLYKMQRMLLEKCDLQNYGDS

SEQ ID NO: 15714 - protein, 25 aa, Artificial Sequence
  Description of Artificial Sequence: Synthetic peptide
GVAMPNLYKMQRMLLEKCDLQNYGD

SEQ ID NO: 15715 - protein, 25 aa, Artificial Sequence
  Description of Artificial Sequence: Synthetic peptide
TTTYKLNVGDYFVLTSHTVMPLSAP

SEQ ID NO: 15716 - protein, 25 aa, Artificial Sequence
  Description of Artificial Sequence: Synthetic peptide
YADVFHLYLQYIRKLHDELTGHMLD

SEQ ID NO: 15717 - protein, 25 aa, Artificial Sequence
  Description of Artificial Sequence: Synthetic peptide
DEDDNLIDSYFVVKRHTFSNYQHEE

SEQ ID NO: 15718 - protein, 25 aa, Artificial Sequence
  Description of Artificial Sequence: Synthetic peptide
VGVALLAVFQSASKIITLKKRWQLA

SEQ ID NO: 15719 - protein, 25 aa, Artificial Sequence
  Description of Artificial Sequence: Synthetic peptide
GVALLAVFQSASKIITLKKRWQLAL

SEQ ID NO: 15720 - protein, 25 aa, Artificial Sequence
  Description of Artificial Sequence: Synthetic peptide
YEDQDALFAYTKRNVIPTITQMNLK

SEQ ID NO: 15721 - protein, 25 aa, Artificial Sequence
  Description of Artificial Sequence: Synthetic peptide
VDDIVKTDGTLMIERFVSLAIDAYP

SEQ ID NO: 15722 - protein, 25 aa, Artificial Sequence
  Description of Artificial Sequence: Synthetic peptide
LVDLPIGINITRFQTLLALHRSYLT

SEQ ID NO: 15723 - protein, 25 aa, Artificial Sequence
  Description of Artificial Sequence: Synthetic peptide
KQIYKTPPIKDFGGFNFSQILPDPS

SEQ ID NO: 15724 - protein, 25 aa, Artificial Sequence
  Description of Artificial Sequence: Synthetic peptide
CPFGEVFNATRFASVYAWNRKRISN

SEQ ID NO: 15725 - protein, 25 aa, Artificial Sequence
  Description of Artificial Sequence: Synthetic peptide
WNTFTRLQSLENVAFNVVNKGHFDG

SEQ ID NO: 15726 - protein, 25 aa, Artificial Sequence
  Description of Artificial Sequence: Synthetic peptide
NTFTRLQSLENVAFNVVNKGHFDGQ

SEQ ID NO: 15727 - protein, 25 aa, Artificial Sequence
  Description of Artificial Sequence: Synthetic peptide
KSEDAQGMDNLACEDLKPVSEEVVE

SEQ ID NO: 15728 - protein, 25 aa, Artificial Sequence
  Description of Artificial Sequence: Synthetic peptide
NNCYLATALLTLQQIELKFNPPALQ

SEQ ID NO: 15729 - protein, 25 aa, Artificial Sequence
  Description of Artificial Sequence: Synthetic peptide
VVQLTSQWLTNIFGTVYEKLKPVLD

SEQ ID NO: 15730 - protein, 25 aa, Artificial Sequence
  Description of Artificial Sequence: Synthetic peptide
GGVVQLTSQWLTNIFGTVYEKLKPV

SEQ ID NO: 15731 - protein, 25 aa, Artificial Sequence
  Description of Artificial Sequence: Synthetic peptide
YSGVVTTVMFLARGIVFMCVEYCPI

SEQ ID NO: 15732 - protein, 25 aa, Artificial Sequence
  Description of Artificial Sequence: Synthetic peptide
ITEEVGHTDLMAAYVDNSSLTIKKP

SEQ ID NO: 15733 - protein, 25 aa, Artificial Sequence
  Description of Artificial Sequence: Synthetic peptide
KITEEVGHTDLMAAYVDNSSLTIKK

SEQ ID NO: 15734 - protein, 25 aa, Artificial Sequence
  Description of Artificial Sequence: Synthetic peptide
GTLSYEQFKKGVQIPCTCGKQATKY

SEQ ID NO: 15735 - protein, 25 aa, Artificial Sequence
  Description of Artificial Sequence: Synthetic peptide
GGDAALALLLLDRLNQLESKMSGKG

SEQ ID NO: 15736 - protein, 25 aa, Artificial Sequence
  Description of Artificial Sequence: Synthetic peptide
LAAIMQLFFSYFAVHFISNSWLMWL

SEQ ID NO: 15737 - protein, 25 aa, Artificial Sequence
  Description of Artificial Sequence: Synthetic peptide
AIMQLFFSYFAVHFISNSWLMWLII

SEQ ID NO: 15738 - protein, 25 aa, Artificial Sequence
  Description of Artificial Sequence: Synthetic peptide
GLAAIMQLFFSYFAVHFISNSWLMW

SEQ ID NO: 15739 - protein, 25 aa, Artificial Sequence
  Description of Artificial Sequence: Synthetic peptide
AAIMQLFFSYFAVHFISNSWLMWLI

SEQ ID NO: 15740 - protein, 25 aa, Artificial Sequence
  Description of Artificial Sequence: Synthetic peptide
ACVEEVTTTLEETKFLTENLLLYID

SEQ ID NO: 15741 - protein, 25 aa, Artificial Sequence
  Description of Artificial Sequence: Synthetic peptide
CVEEVTTTLEETKFLTENLLLYIDI

SEQ ID NO: 15742 - protein, 25 aa, Artificial Sequence
  Description of Artificial Sequence: Synthetic peptide
LLSDLQDLKWARFPKSDGTGTIYTE

SEQ ID NO: 15743 - protein, 25 aa, Artificial Sequence
  Description of Artificial Sequence: Synthetic peptide
ALLSDLQDLKWARFPKSDGTGTIYT

SEQ ID NO: 15744 - protein, 25 aa, Artificial Sequence
  Description of Artificial Sequence: Synthetic peptide
LALLSDLQDLKWARFPKSDGTGTIY

SEQ ID NO: 15745 - protein, 25 aa, Artificial Sequence
  Description of Artificial Sequence: Synthetic peptide
IKACVEEVTTTLEETKFLTENLLLY

SEQ ID NO: 15746 - protein, 25 aa, Artificial Sequence
  Description of Artificial Sequence: Synthetic peptide
KACVEEVTTTLEETKFLTENLLLYI

SEQ ID NO: 15747 - protein, 25 aa, Artificial Sequence
  Description of Artificial Sequence: Synthetic peptide
GDYILANTCTERLKLFAAETLKATE

SEQ ID NO: 15748 - protein, 25 aa, Artificial Sequence
  Description of Artificial Sequence: Synthetic peptide
APHGVVFLHVTYVPAQEKNFTTAPA

SEQ ID NO: 15749 - protein, 25 aa, Artificial Sequence
  Description of Artificial Sequence: Synthetic peptide
QSAPHGVVFLHVTYVPAQEKNFTTA

SEQ ID NO: 15750 - protein, 25 aa, Artificial Sequence
  Description of Artificial Sequence: Synthetic peptide
SAPHGVVFLHVTYVPAQEKNFTTAP

SEQ ID NO: 15751 - protein, 25 aa, Artificial Sequence
  Description of Artificial Sequence: Synthetic peptide
FPQSAPHGVVFLHVTYVPAQEKNFT

SEQ ID NO: 15752 - protein, 25 aa, Artificial Sequence
  Description of Artificial Sequence: Synthetic peptide
PQSAPHGVVFLHVTYVPAQEKNFTT

SEQ ID NO: 15753 - protein, 25 aa, Artificial Sequence
  Description of Artificial Sequence: Synthetic peptide
TGYKKPASRELKVTFFPDLNGDVVA

SEQ ID NO: 15754 - protein, 25 aa, Artificial Sequence
  Description of Artificial Sequence: Synthetic peptide
GYKKPASRELKVTFFPDLNGDVVAI

SEQ ID NO: 15755 - protein, 25 aa, Artificial Sequence
  Description of Artificial Sequence: Synthetic peptide
IVTALRANSAVKLQNNELSPVALRQ

SEQ ID NO: 15756 - protein, 25 aa, Artificial Sequence
  Description of Artificial Sequence: Synthetic peptide
LIVTALRANSAVKLQNNELSPVALR

SEQ ID NO: 15757 - protein, 25 aa, Artificial Sequence
  Description of Artificial Sequence: Synthetic peptide
PRVFSAVGNICYTPSKLIEYTDFAT

SEQ ID NO: 15758 - protein, 25 aa, Artificial Sequence
  Description of Artificial Sequence: Synthetic peptide
GDYFVLTSHTVMPLSAPTLVPQEHY

SEQ ID NO: 15759 - protein, 25 aa, Artificial Sequence
  Description of Artificial Sequence: Synthetic peptide
IPRRNVATLQAENVTGLFKDCSKVI

SEQ ID NO: 15760 - protein, 25 aa, Artificial Sequence
  Description of Artificial Sequence: Synthetic peptide
GKTFYVLPNDDTLRVEAFEYYHTTD

SEQ ID NO: 15761 - protein, 25 aa, Artificial Sequence
  Description of Artificial Sequence: Synthetic peptide
YCFLGYFCTCYFGLFCLLNRYFRLT

SEQ ID NO: 15762 - protein, 25 aa, Artificial Sequence
  Description of Artificial Sequence: Synthetic peptide
CFLGYFCTCYFGLFCLLNRYFRLTL

SEQ ID NO: 15763 - protein, 25 aa, Artificial Sequence
  Description of Artificial Sequence: Synthetic peptide
RRCPAEIVDTVSALVYDNKLKAHKD

SEQ ID NO: 15764 - protein, 25 aa, Artificial Sequence
  Description of Artificial Sequence: Synthetic peptide
WTNAGDYILANTCTERLKLFAAETL

SEQ ID NO: 15765 - protein, 25 aa, Artificial Sequence
  Description of Artificial Sequence: Synthetic peptide
TCDWTNAGDYILANTCTERLKLFAA

SEQ ID NO: 15766 - protein, 25 aa, Artificial Sequence
  Description of Artificial Sequence: Synthetic peptide
DWTNAGDYILANTCTERLKLFAAET

SEQ ID NO: 15767 - protein, 25 aa, Artificial Sequence
  Description of Artificial Sequence: Synthetic peptide
CDWTNAGDYILANTCTERLKLFAAE

SEQ ID NO: 15768 - protein, 25 aa, Artificial Sequence
  Description of Artificial Sequence: Synthetic peptide
VEKGIYQTSNFRVQPTESIVRFPNI

SEQ ID NO: 15769 - protein, 25 aa, Artificial Sequence
  Description of Artificial Sequence: Synthetic peptide
FYLTNDVSFLAHIQWMVMFTPLVPF

SEQ ID NO: 15770 - protein, 25 aa, Artificial Sequence
  Description of Artificial Sequence: Synthetic peptide
LTNDVSFLAHIQWMVMFTPLVPFWI

SEQ ID NO: 15771 - protein, 25 aa, Artificial Sequence
  Description of Artificial Sequence: Synthetic peptide
TNDVSFLAHIQWMVMFTPLVPFWIT

SEQ ID NO: 15772 - protein, 25 aa, Artificial Sequence
  Description of Artificial Sequence: Synthetic peptide
YLTNDVSFLAHIQWMVMFTPLVPFW

SEQ ID NO: 15773 - protein, 25 aa, Artificial Sequence
  Description of Artificial Sequence: Synthetic peptide
TGYRVTKNSKVQIGEYTFEKGDYGD

SEQ ID NO: 15774 - protein, 25 aa, Artificial Sequence
  Description of Artificial Sequence: Synthetic peptide
AEIVDTVSALVYDNKLKAHKDKSAQ

SEQ ID NO: 15775 - protein, 25 aa, Artificial Sequence
  Description of Artificial Sequence: Synthetic peptide
IVDTVSALVYDNKLKAHKDKSAQCF

SEQ ID NO: 15776 - protein, 25 aa, Artificial Sequence
  Description of Artificial Sequence: Synthetic peptide
EIVDTVSALVYDNKLKAHKDKSAQC

SEQ ID NO: 15777 - protein, 25 aa, Artificial Sequence
  Description of Artificial Sequence: Synthetic peptide
DKLQFTSLEIPRRNVATLQAENVTG

SEQ ID NO: 15778 - protein, 25 aa, Artificial Sequence
  Description of Artificial Sequence: Synthetic peptide
LQFTSLEIPRRNVATLQAENVTGLF

SEQ ID NO: 15779 - protein, 25 aa, Artificial Sequence
  Description of Artificial Sequence: Synthetic peptide
YFAVHFISNSWLMWLIINLVQMAPI

SEQ ID NO: 15780 - protein, 25 aa, Artificial Sequence
  Description of Artificial Sequence: Synthetic peptide
SYFAVHFISNSWLMWLIINLVQMAP

SEQ ID NO: 15781 - protein, 25 aa, Artificial Sequence
  Description of Artificial Sequence: Synthetic peptide
EIDRLNEVAKNLNESLIDLQELGKY

SEQ ID NO: 15782 - protein, 25 aa, Artificial Sequence
  Description of Artificial Sequence: Synthetic peptide
YLTFYLTNDVSFLAHIQWMVMFTPL

SEQ ID NO: 15783 - protein, 25 aa, Artificial Sequence
  Description of Artificial Sequence: Synthetic peptide
YLYLTFYLTNDVSFLAHIQWMVMFT

SEQ ID NO: 15784 - protein, 25 aa, Artificial Sequence
  Description of Artificial Sequence: Synthetic peptide
LTFYLTNDVSFLAHIQWMVMFTPLV

SEQ ID NO: 15785 - protein, 25 aa, Artificial Sequence
  Description of Artificial Sequence: Synthetic peptide
IYLYLTFYLTNDVSFLAHIQWMVMF

SEQ ID NO: 15786 - protein, 25 aa, Artificial Sequence
  Description of Artificial Sequence: Synthetic peptide
VIYLYLTFYLTNDVSFLAHIQWMVM

SEQ ID NO: 15787 - protein, 25 aa, Artificial Sequence
  Description of Artificial Sequence: Synthetic peptide
LYLTFYLTNDVSFLAHIQWMVMFTP

SEQ ID NO: 15788 - protein, 25 aa, Artificial Sequence
  Description of Artificial Sequence: Synthetic peptide
GRFVLALLSDLQDLKWARFPKSDGT

SEQ ID NO: 15789 - protein, 25 aa, Artificial Sequence
  Description of Artificial Sequence: Synthetic peptide
SSTCMMCYKRNRATRVECTTIVNGV

SEQ ID NO: 15790 - protein, 25 aa, Artificial Sequence
  Description of Artificial Sequence: Synthetic peptide
NSSTCMMCYKRNRATRVECTTIVNG

SEQ ID NO: 15791 - protein, 25 aa, Artificial Sequence
  Description of Artificial Sequence: Synthetic peptide
NVSLVKPSFYVYSRVKNLNSSRVPD

SEQ ID NO: 15792 - protein, 25 aa, Artificial Sequence
  Description of Artificial Sequence: Synthetic peptide
VSLVKPSFYVYSRVKNLNSSRVPDL

SEQ ID NO: 15793 - protein, 25 aa, Artificial Sequence
  Description of Artificial Sequence: Synthetic peptide
CMMCYKRNRATRVECTTIVNGVRRS

SEQ ID NO: 15794 - protein, 25 aa, Artificial Sequence
  Description of Artificial Sequence: Synthetic peptide
STCMMCYKRNRATRVECTTIVNGVR

SEQ ID NO: 15795 - protein, 25 aa, Artificial Sequence
  Description of Artificial Sequence: Synthetic peptide
MMCYKRNRATRVECTTIVNGVRRSF

SEQ ID NO: 15796 - protein, 25 aa, Artificial Sequence
  Description of Artificial Sequence: Synthetic peptide
MCYKRNRATRVECTTIVNGVRRSFY

SEQ ID NO: 15797 - protein, 25 aa, Artificial Sequence
  Description of Artificial Sequence: Synthetic peptide
TCMMCYKRNRATRVECTTIVNGVRR

SEQ ID NO: 15798 - protein, 25 aa, Artificial Sequence
  Description of Artificial Sequence: Synthetic peptide
EVPANSTVLSFCAFAVDAAKAYKDY

SEQ ID NO: 15799 - protein, 25 aa, Artificial Sequence
  Description of Artificial Sequence: Synthetic peptide
ADYNYKLPDDFTGCVIAWNSNNLDS

SEQ ID NO: 15800 - protein, 25 aa, Artificial Sequence
  Description of Artificial Sequence: Synthetic peptide
RMAGNGGDAALALLLLDRLNQLESK

SEQ ID NO: 15801 - protein, 25 aa, Artificial Sequence
  Description of Artificial Sequence: Synthetic peptide
TIQRKYKGIKIQEGVVDYGARFYFY

SEQ ID NO: 15802 - protein, 25 aa, Artificial Sequence
  Description of Artificial Sequence: Synthetic peptide
STIQRKYKGIKIQEGVVDYGARFYF

SEQ ID NO: 15803 - protein, 25 aa, Artificial Sequence
  Description of Artificial Sequence: Synthetic peptide
VVDGCNSSTCMMCYKRNRATRVECT

SEQ ID NO: 15804 - protein, 25 aa, Artificial Sequence
  Description of Artificial Sequence: Synthetic peptide
HVVDGCNSSTCMMCYKRNRATRVEC

SEQ ID NO: 15805 - protein, 25 aa, Artificial Sequence
  Description of Artificial Sequence: Synthetic peptide
TSKETLYCIDGALLTKSSEYKGPIT

SEQ ID NO: 15806 - protein, 25 aa, Artificial Sequence
  Description of Artificial Sequence: Synthetic peptide
VPAQEKNFTTAPAICHDGKAHFPRE

SEQ ID NO: 15807 - protein, 25 aa, Artificial Sequence
  Description of Artificial Sequence: Synthetic peptide
YVPAQEKNFTTAPAICHDGKAHFPR

SEQ ID NO: 15808 - protein, 25 aa, Artificial Sequence
  Description of Artificial Sequence: Synthetic peptide
GCNSSTCMMCYKRNRATRVECTTIV

SEQ ID NO: 15809 - protein, 25 aa, Artificial Sequence
  Description of Artificial Sequence: Synthetic peptide
LLPSLATVAYFNMVYMPASWVMRIM

SEQ ID NO: 15810 - protein, 25 aa, Artificial Sequence
  Description of Artificial Sequence: Synthetic peptide
LFLLPSLATVAYFNMVYMPASWVMR

SEQ ID NO: 15811 - protein, 25 aa, Artificial Sequence
  Description of Artificial Sequence: Synthetic peptide
FLLPSLATVAYFNMVYMPASWVMRI

SEQ ID NO: 15812 - protein, 25 aa, Artificial Sequence
  Description of Artificial Sequence: Synthetic peptide
YYKKDNSYFTEQPIDLVPNQPYPNA

SEQ ID NO: 15813 - protein, 25 aa, Artificial Sequence
  Description of Artificial Sequence: Synthetic peptide
NYYKKDNSYFTEQPIDLVPNQPYPN

SEQ ID NO: 15814 - protein, 25 aa, Artificial Sequence
  Description of Artificial Sequence: Synthetic peptide
KKDNSYFTEQPIDLVPNQPYPNASF

SEQ ID NO: 15815 - protein, 25 aa, Artificial Sequence
  Description of Artificial Sequence: Synthetic peptide
YKKDNSYFTEQPIDLVPNQPYPNAS

SEQ ID NO: 15816 - protein, 25 aa, Artificial Sequence
  Description of Artificial Sequence: Synthetic peptide
LANTCTERLKLFAAETLKATEETFK

SEQ ID NO: 15817 - protein, 25 aa, Artificial Sequence
  Description of Artificial Sequence: Synthetic peptide
ANTCTERLKLFAAETLKATEETFKL

SEQ ID NO: 15818 - protein, 25 aa, Artificial Sequence
  Description of Artificial Sequence: Synthetic peptide
NTCTERLKLFAAETLKATEETFKLS

SEQ ID NO: 15819 - protein, 25 aa, Artificial Sequence
  Description of Artificial Sequence: Synthetic peptide
CYLATALLTLQQIELKFNPPALQDA

SEQ ID NO: 15820 - protein, 25 aa, Artificial Sequence
  Description of Artificial Sequence: Synthetic peptide
ATALLTLQQIELKFNPPALQDAYYR

SEQ ID NO: 15821 - protein, 25 aa, Artificial Sequence
  Description of Artificial Sequence: Synthetic peptide
YLATALLTLQQIELKFNPPALQDAY

SEQ ID NO: 15822 - protein, 25 aa, Artificial Sequence
  Description of Artificial Sequence: Synthetic peptide
LATALLTLQQIELKFNPPALQDAYY

SEQ ID NO: 15823 - protein, 25 aa, Artificial Sequence
  Description of Artificial Sequence: Synthetic peptide
NCYLATALLTLQQIELKFNPPALQD

SEQ ID NO: 15824 - protein, 25 aa, Artificial Sequence
  Description of Artificial Sequence: Synthetic peptide
ALLTLQQIELKFNPPALQDAYYRAR

SEQ ID NO: 15825 - protein, 25 aa, Artificial Sequence
  Description of Artificial Sequence: Synthetic peptide
TALLTLQQIELKFNPPALQDAYYRA

SEQ ID NO: 15826 - protein, 25 aa, Artificial Sequence
  Description of Artificial Sequence: Synthetic peptide
SSYIVDSVTVKNGSIHLYFDKAGQK

SEQ ID NO: 15827 - protein, 25 aa, Artificial Sequence
  Description of Artificial Sequence: Synthetic peptide
HADQLTPTWRVYSTGSNVFQTRAGC

SEQ ID NO: 15828 - protein, 25 aa, Artificial Sequence
  Description of Artificial Sequence: Synthetic peptide
WNIGEQKSILSPLYAFASEAARVVR

SEQ ID NO: 15829 - protein, 25 aa, Artificial Sequence
  Description of Artificial Sequence: Synthetic peptide
DPNFKDQVILLNKHIDAYKTFPPTE

SEQ ID NO: 15830 - protein, 25 aa, Artificial Sequence
  Description of Artificial Sequence: Synthetic peptide
KDPNFKDQVILLNKHIDAYKTFPPT

SEQ ID NO: 15831 - protein, 25 aa, Artificial Sequence
  Description of Artificial Sequence: Synthetic peptide
QIRSAAKKNNLPFKLTCATTRQVVN

SEQ ID NO: 15832 - protein, 25 aa, Artificial Sequence
  Description of Artificial Sequence: Synthetic peptide
KDQVILLNKHIDAYKTFPPTEPKKD

SEQ ID NO: 15833 - protein, 25 aa, Artificial Sequence
  Description of Artificial Sequence: Synthetic peptide
NGVSFSTFEEAALCTFLLNKEMYLK

SEQ ID NO: 15834 - protein, 25 aa, Artificial Sequence
  Description of Artificial Sequence: Synthetic peptide
NQDLNGNWYDFGDFIQTTPGSGVPV

SEQ ID NO: 15835 - protein, 25 aa, Artificial Sequence
  Description of Artificial Sequence: Synthetic peptide
QDLNGNWYDFGDFIQTTPGSGVPVV

SEQ ID NO: 15836 - protein, 25 aa, Artificial Sequence
  Description of Artificial Sequence: Synthetic peptide
ANSTVLSFCAFAVDAAKAYKDYLAS

SEQ ID NO: 15837 - protein, 25 aa, Artificial Sequence
  Description of Artificial Sequence: Synthetic peptide
AQGMDNLACEDLKPVSEEVVENPTI

SEQ ID NO: 15838 - protein, 25 aa, Artificial Sequence
  Description of Artificial Sequence: Synthetic peptide
SDDYIATNGPLKVGGSCVLSGHNLA

SEQ ID NO: 15839 - protein, 25 aa, Artificial Sequence
  Description of Artificial Sequence: Synthetic peptide
DITFLKKDAPYIVGDVVQEGVLTAV

SEQ ID NO: 15840 - protein, 25 aa, Artificial Sequence
  Description of Artificial Sequence: Synthetic peptide
TSNFRVQPTESIVRFPNITNLCPFG

SEQ ID NO: 15841 - protein, 25 aa, Artificial Sequence
  Description of Artificial Sequence: Synthetic peptide
SVYYTSNPTTFHLDGEVITFDNLKT

SEQ ID NO: 15842 - protein, 25 aa, Artificial Sequence
  Description of Artificial Sequence: Synthetic peptide
REVRTIKVFTTVDNINLHTQVVDMS

SEQ ID NO: 15843 - protein, 25 aa, Artificial Sequence
  Description of Artificial Sequence: Synthetic peptide
YTVELGTEVNEFACVVADAVIKTLQ

SEQ ID NO: 15844 - protein, 25 aa, Artificial Sequence
  Description of Artificial Sequence: Synthetic peptide
DSVTVKNGSIHLYFDKAGQKTYERH

SEQ ID NO: 15845 - protein, 25 aa, Artificial Sequence
  Description of Artificial Sequence: Synthetic peptide
LDYIINLIIKNLSKSLTENKYSQLD

SEQ ID NO: 15846 - protein, 25 aa, Artificial Sequence
  Description of Artificial Sequence: Synthetic peptide
NLDYIINLIIKNLSKSLTENKYSQL

SEQ ID NO: 15847 - protein, 25 aa, Artificial Sequence
  Description of Artificial Sequence: Synthetic peptide
YAFASEAARVVRSIFSRTLETAQNS

SEQ ID NO: 15848 - protein, 25 aa, Artificial Sequence
  Description of Artificial Sequence: Synthetic peptide
GTEVNEFACVVADAVIKTLQPVSEL

SEQ ID NO: 15849 - protein, 25 aa, Artificial Sequence
  Description of Artificial Sequence: Synthetic peptide
LLLQLCTFTRSTNSRIKASMPTTIA

SEQ ID NO: 15850 - protein, 25 aa, Artificial Sequence
  Description of Artificial Sequence: Synthetic peptide
LTTAAKLMVVIPDYNTYKNTCDGTT

SEQ ID NO: 15851 - protein, 25 aa, Artificial Sequence
  Description of Artificial Sequence: Synthetic peptide
TTAAKLMVVIPDYNTYKNTCDGTTF

SEQ ID NO: 15852 - protein, 25 aa, Artificial Sequence
  Description of Artificial Sequence: Synthetic peptide
RDGCVPLNIIPLTTAAKLMVVIPDY

SEQ ID NO: 15853 - protein, 25 aa, Artificial Sequence
  Description of Artificial Sequence: Synthetic peptide
DGCVPLNIIPLTTAAKLMVVIPDYN

SEQ ID NO: 15854 - protein, 25 aa, Artificial Sequence
  Description of Artificial Sequence: Synthetic peptide
PVPYCYDTNVLEGSVAYESLRPDTR

SEQ ID NO: 15855 - protein, 25 aa, Artificial Sequence
  Description of Artificial Sequence: Synthetic peptide
KPVPYCYDTNVLEGSVAYESLRPDT

SEQ ID NO: 15856 - protein, 25 aa, Artificial Sequence
  Description of Artificial Sequence: Synthetic peptide
NNDYYRSLPGVFCGVDAVNLLTNMF

SEQ ID NO: 15857 - protein, 25 aa, Artificial Sequence
  Description of Artificial Sequence: Synthetic peptide
YRSLPGVFCGVDAVNLLTNMFTPLI

SEQ ID NO: 15858 - protein, 25 aa, Artificial Sequence
  Description of Artificial Sequence: Synthetic peptide
YYRSLPGVFCGVDAVNLLTNMFTPL

SEQ ID NO: 15859 - protein, 25 aa, Artificial Sequence
  Description of Artificial Sequence: Synthetic peptide
DYYRSLPGVFCGVDAVNLLTNMFTP

SEQ ID NO: 15860 - protein, 25 aa, Artificial Sequence
  Description of Artificial Sequence: Synthetic peptide
NDYYRSLPGVFCGVDAVNLLTNMFT

SEQ ID NO: 15861 - protein, 25 aa, Artificial Sequence
  Description of Artificial Sequence: Synthetic peptide
RSLPGVFCGVDAVNLLTNMFTPLIQ

SEQ ID NO: 15862 - protein, 25 aa, Artificial Sequence
  Description of Artificial Sequence: Synthetic peptide
PASRELKVTFFPDLNGDVVAIDYKH

SEQ ID NO: 15863 - protein, 25 aa, Artificial Sequence
  Description of Artificial Sequence: Synthetic peptide
PAQEKNFTTAPAICHDGKAHFPREG

SEQ ID NO: 15864 - protein, 25 aa, Artificial Sequence
  Description of Artificial Sequence: Synthetic peptide
PLNSIIKTIQPRVEKKKLDGFMGRI

SEQ ID NO: 15865 - protein, 25 aa, Artificial Sequence
  Description of Artificial Sequence: Synthetic peptide
FASEAARVVRSIFSRTLETAQNSVR

SEQ ID NO: 15866 - protein, 25 aa, Artificial Sequence
  Description of Artificial Sequence: Synthetic peptide
ASEAARVVRSIFSRTLETAQNSVRV

SEQ ID NO: 15867 - protein, 25 aa, Artificial Sequence
  Description of Artificial Sequence: Synthetic peptide
TSNYSGVVTTVMFLARGIVFMCVEY

SEQ ID NO: 15868 - protein, 25 aa, Artificial Sequence
  Description of Artificial Sequence: Synthetic peptide
AKAYKDYLASGGQPITNCVKMLCTH

SEQ ID NO: 15869 - protein, 25 aa, Artificial Sequence
  Description of Artificial Sequence: Synthetic peptide
KAYKDYLASGGQPITNCVKMLCTHT

SEQ ID NO: 15870 - protein, 25 aa, Artificial Sequence
  Description of Artificial Sequence: Synthetic peptide
VNEFACVVADAVIKTLQPVSELLTP

SEQ ID NO: 15871 - protein, 25 aa, Artificial Sequence
  Description of Artificial Sequence: Synthetic peptide
INITRFQTLLALHRSYLTPGDSSSG

SEQ ID NO: 15872 - protein, 25 aa, Artificial Sequence
  Description of Artificial Sequence: Synthetic peptide
PYCYDTNVLEGSVAYESLRPDTRYV

SEQ ID NO: 15873 - protein, 25 aa, Artificial Sequence
  Description of Artificial Sequence: Synthetic peptide
NLACEDLKPVSEEVVENPTIQKDVL

SEQ ID NO: 15874 - protein, 25 aa, Artificial Sequence
  Description of Artificial Sequence: Synthetic peptide
EDLKPVSEEVVENPTIQKDVLECNV

SEQ ID NO: 15875 - protein, 25 aa, Artificial Sequence
  Description of Artificial Sequence: Synthetic peptide
LACEDLKPVSEEVVENPTIQKDVLE

SEQ ID NO: 15876 - protein, 25 aa, Artificial Sequence
  Description of Artificial Sequence: Synthetic peptide
CEDLKPVSEEVVENPTIQKDVLECN

SEQ ID NO: 15877 - protein, 25 aa, Artificial Sequence
  Description of Artificial Sequence: Synthetic peptide
ACEDLKPVSEEVVENPTIQKDVLEC

SEQ ID NO: 15878 - protein, 25 aa, Artificial Sequence
  Description of Artificial Sequence: Synthetic peptide
KQIVESCGNFKVTKGKAKKGAWNIG

SEQ ID NO: 15879 - protein, 25 aa, Artificial Sequence
  Description of Artificial Sequence: Synthetic peptide
AFKQIVESCGNFKVTKGKAKKGAWN

SEQ ID NO: 15880 - protein, 25 aa, Artificial Sequence
  Description of Artificial Sequence: Synthetic peptide
FKQIVESCGNFKVTKGKAKKGAWNI

SEQ ID NO: 15881 - protein, 25 aa, Artificial Sequence
  Description of Artificial Sequence: Synthetic peptide
GVLMSNLGMPSYCTGYREGYLNSTN

SEQ ID NO: 15882 - protein, 25 aa, Artificial Sequence
  Description of Artificial Sequence: Synthetic peptide
ASGKPVPYCYDTNVLEGSVAYESLR

SEQ ID NO: 15883 - protein, 25 aa, Artificial Sequence
  Description of Artificial Sequence: Synthetic peptide
EAELAKNVSLDNVLSTFISAARQGF

SEQ ID NO: 15884 - protein, 25 aa, Artificial Sequence
  Description of Artificial Sequence: Synthetic peptide
AEAELAKNVSLDNVLSTFISAARQG

SEQ ID NO: 15885 - protein, 25 aa, Artificial Sequence
  Description of Artificial Sequence: Synthetic peptide
AELAKNVSLDNVLSTFISAARQGFV

SEQ ID NO: 15886 - protein, 25 aa, Artificial Sequence
  Description of Artificial Sequence: Synthetic peptide
YPNMFITREEAIRHVRAWIGFDVEG

SEQ ID NO: 15887 - protein, 25 aa, Artificial Sequence
  Description of Artificial Sequence: Synthetic peptide
QGLVASIKNFKSVLYYQNNVFMSEA

SEQ ID NO: 15888 - protein, 25 aa, Artificial Sequence
  Description of Artificial Sequence: Synthetic peptide
VNTFSSTFNVPMEKLKTLVATAEAE

SEQ ID NO: 15889 - protein, 25 aa, Artificial Sequence
  Description of Artificial Sequence: Synthetic peptide
LPFFSNVTWFHAIHVSGTNGTKRFD

SEQ ID NO: 15890 - protein, 25 aa, Artificial Sequence
  Description of Artificial Sequence: Synthetic peptide
FLPFFSNVTWFHAIHVSGTNGTKRF

SEQ ID NO: 15891 - protein, 25 aa, Artificial Sequence
  Description of Artificial Sequence: Synthetic peptide
LFLPFFSNVTWFHAIHVSGTNGTKR

SEQ ID NO: 15892 - protein, 25 aa, Artificial Sequence
  Description of Artificial Sequence: Synthetic peptide
FSSTFNVPMEKLKTLVATAEAELAK

SEQ ID NO: 15893 - protein, 25 aa, Artificial Sequence
  Description of Artificial Sequence: Synthetic peptide
FTPFDVVRQCSGVTFQSAVKRTIKG

SEQ ID NO: 15894 - protein, 25 aa, Artificial Sequence
  Description of Artificial Sequence: Synthetic peptide
EFTPFDVVRQCSGVTFQSAVKRTIK

SEQ ID NO: 15895 - protein, 25 aa, Artificial Sequence
  Description of Artificial Sequence: Synthetic peptide
QKEKVNINIVGDFKLNEEIAIILAS

SEQ ID NO: 15896 - protein, 25 aa, Artificial Sequence
  Description of Artificial Sequence: Synthetic peptide
ISASIVAGGIVAIVVTCLAYYFMRF

SEQ ID NO: 15897 - protein, 25 aa, Artificial Sequence
  Description of Artificial Sequence: Synthetic peptide
APYIVGDVVQEGVLTAVVIPTKKAG

SEQ ID NO: 15898 - protein, 25 aa, Artificial Sequence
  Description of Artificial Sequence: Synthetic peptide
KDAPYIVGDVVQEGVLTAVVIPTKK

SEQ ID NO: 15899 - protein, 25 aa, Artificial Sequence
  Description of Artificial Sequence: Synthetic peptide
DAPYIVGDVVQEGVLTAVVIPTKKA

SEQ ID NO: 15900 - protein, 25 aa, Artificial Sequence
  Description of Artificial Sequence: Synthetic peptide
VEAFEYYHTTDPSFLGRYMSALNHT

SEQ ID NO: 15901 - protein, 25 aa, Artificial Sequence
  Description of Artificial Sequence: Synthetic peptide
SVAYESLRPDTRYVLMDGSIIQFPN

SEQ ID NO: 15902 - protein, 25 aa, Artificial Sequence
  Description of Artificial Sequence: Synthetic peptide
GMDNLACEDLKPVSEEVVENPTIQK

SEQ ID NO: 15903 - protein, 25 aa, Artificial Sequence
  Description of Artificial Sequence: Synthetic peptide
AAMQRKLEKMADQAMTQMYKQARSE

SEQ ID NO: 15904 - protein, 25 aa, Artificial Sequence
  Description of Artificial Sequence: Synthetic peptide
CTFTRSTNSRIKASMPTTIAKNTVK

SEQ ID NO: 15905 - protein, 25 aa, Artificial Sequence
  Description of Artificial Sequence: Synthetic peptide
LCTFTRSTNSRIKASMPTTIAKNTV

SEQ ID NO: 15906 - protein, 25 aa, Artificial Sequence
  Description of Artificial Sequence: Synthetic peptide
VLYQPPQTSITSAVLQSGFRKMAFP

SEQ ID NO: 15907 - protein, 25 aa, Artificial Sequence
  Description of Artificial Sequence: Synthetic peptide
LYQPPQTSITSAVLQSGFRKMAFPS

SEQ ID NO: 15908 - protein, 25 aa, Artificial Sequence
  Description of Artificial Sequence: Synthetic peptide
DVLYQPPQTSITSAVLQSGFRKMAF

SEQ ID NO: 15909 - protein, 25 aa, Artificial Sequence
  Description of Artificial Sequence: Synthetic peptide
YQPPQTSITSAVLQSGFRKMAFPSG

SEQ ID NO: 15910 - protein, 25 aa, Artificial Sequence
  Description of Artificial Sequence: Synthetic peptide
QPPQTSITSAVLQSGFRKMAFPSGK

SEQ ID NO: 15911 - protein, 25 aa, Artificial Sequence
  Description of Artificial Sequence: Synthetic peptide
SDVLYQPPQTSITSAVLQSGFRKMA

SEQ ID NO: 15912 - protein, 25 aa, Artificial Sequence
  Description of Artificial Sequence: Synthetic peptide
ATYYLFDESGEFKLASHMYCSFYPP

SEQ ID NO: 15913 - protein, 25 aa, Artificial Sequence
  Description of Artificial Sequence: Synthetic peptide
DKKIKACVEEVTTTLEETKFLTENL

SEQ ID NO: 15914 - protein, 25 aa, Artificial Sequence
  Description of Artificial Sequence: Synthetic peptide
KKIKACVEEVTTTLEETKFLTENLL

SEQ ID NO: 15915 - protein, 25 aa, Artificial Sequence
  Description of Artificial Sequence: Synthetic peptide
LNRVCTNYMPYFFTLLLQLCTFTRS

SEQ ID NO: 15916 - protein, 25 aa, Artificial Sequence
  Description of Artificial Sequence: Synthetic peptide
CLNRVCTNYMPYFFTLLLQLCTFTR

SEQ ID NO: 15917 - protein, 25 aa, Artificial Sequence
  Description of Artificial Sequence: Synthetic peptide
RCLNRVCTNYMPYFFTLLLQLCTFT

SEQ ID NO: 15918 - protein, 25 aa, Artificial Sequence
  Description of Artificial Sequence: Synthetic peptide
RLTLGVYDYLVSTQEFRYMNSQGLL

SEQ ID NO: 15919 - protein, 25 aa, Artificial Sequence
  Description of Artificial Sequence: Synthetic peptide
FRLTLGVYDYLVSTQEFRYMNSQGL

SEQ ID NO: 15920 - protein, 25 aa, Artificial Sequence
  Description of Artificial Sequence: Synthetic peptide
YFRLTLGVYDYLVSTQEFRYMNSQG

SEQ ID NO: 15921 - protein, 25 aa, Artificial Sequence
  Description of Artificial Sequence: Synthetic peptide
SSGVTRELMRELNGGAYTRYVDNNF

SEQ ID NO: 15922 - protein, 25 aa, Artificial Sequence
  Description of Artificial Sequence: Synthetic peptide
HSSGVTRELMRELNGGAYTRYVDNN

SEQ ID NO: 15923 - protein, 25 aa, Artificial Sequence
  Description of Artificial Sequence: Synthetic peptide
SGVTRELMRELNGGAYTRYVDNNFC

SEQ ID NO: 15924 - protein, 25 aa, Artificial Sequence
  Description of Artificial Sequence: Synthetic peptide
FLNKVVSTTTNIVTRCLNRVCTNYM

SEQ ID NO: 15925 - protein, 25 aa, Artificial Sequence
  Description of Artificial Sequence: Synthetic peptide
LNKVVSTTTNIVTRCLNRVCTNYMP

SEQ ID NO: 15926 - protein, 25 aa, Artificial Sequence
  Description of Artificial Sequence: Synthetic peptide
VVRQCSGVTFQSAVKRTIKGTHHWL

SEQ ID NO: 15927 - protein, 25 aa, Artificial Sequence
  Description of Artificial Sequence: Synthetic peptide
PSARIVYTACSHAAVDALCEKALKY

SEQ ID NO: 15928 - protein, 25 aa, Artificial Sequence
  Description of Artificial Sequence: Synthetic peptide
ESDDYIATNGPLKVGGSCVLSGHNL

SEQ ID NO: 15929 - protein, 25 aa, Artificial Sequence
  Description of Artificial Sequence: Synthetic peptide
TTLEETKFLTENLLLYIDINGNLHP

SEQ ID NO: 15930 - protein, 25 aa, Artificial Sequence
  Description of Artificial Sequence: Synthetic peptide
TTTLEETKFLTENLLLYIDINGNLH

SEQ ID NO: 15931 - protein, 25 aa, Artificial Sequence
  Description of Artificial Sequence: Synthetic peptide
ALKGGKIVNNWLKQLIKVTLVFLFV

SEQ ID NO: 15932 - protein, 25 aa, Artificial Sequence
  Description of Artificial Sequence: Synthetic peptide
SNSFDVLKSEDAQGMDNLACEDLKP

SEQ ID NO: 15933 - protein, 25 aa, Artificial Sequence
  Description of Artificial Sequence: Synthetic peptide
NSFDVLKSEDAQGMDNLACEDLKPV

SEQ ID NO: 15934 - protein, 25 aa, Artificial Sequence
  Description of Artificial Sequence: Synthetic peptide
VVTTKIALKGGKIVNNWLKQLIKVT

SEQ ID NO: 15935 - protein, 25 aa, Artificial Sequence
  Description of Artificial Sequence: Synthetic peptide
VTTKIALKGGKIVNNWLKQLIKVTL

SEQ ID NO: 15936 - protein, 25 aa, Artificial Sequence
  Description of Artificial Sequence: Synthetic peptide
SMDNSPNLAWPLIVTALRANSAVKL

SEQ ID NO: 15937 - protein, 25 aa, Artificial Sequence
  Description of Artificial Sequence: Synthetic peptide
ISMDNSPNLAWPLIVTALRANSAVK

SEQ ID NO: 15938 - protein, 25 aa, Artificial Sequence
  Description of Artificial Sequence: Synthetic peptide
LMTARTVYDDGARRVWTLMNVLTLV

SEQ ID NO: 15939 - protein, 25 aa, Artificial Sequence
  Description of Artificial Sequence: Synthetic peptide
SFYVYANGGKGFCKLHNWNCVNCDT

SEQ ID NO: 15940 - protein, 25 aa, Artificial Sequence
  Description of Artificial Sequence: Synthetic peptide
SEAARVVRSIFSRTLETAQNSVRVL

SEQ ID NO: 15941 - protein, 25 aa, Artificial Sequence
  Description of Artificial Sequence: Synthetic peptide
SSPDAVTAYNGYLTSSSKTPEEHFI

SEQ ID NO: 15942 - protein, 25 aa, Artificial Sequence
  Description of Artificial Sequence: Synthetic peptide
SPDAVTAYNGYLTSSSKTPEEHFIE

SEQ ID NO: 15943 - protein, 25 aa, Artificial Sequence
  Description of Artificial Sequence: Synthetic peptide
KLKDCVMYASAVVLLILMTARTVYD

SEQ ID NO: 15944 - protein, 25 aa, Artificial Sequence
  Description of Artificial Sequence: Synthetic peptide
LLILMTARTVYDDGARRVWTLMNVL

SEQ ID NO: 15945 - protein, 25 aa, Artificial Sequence
  Description of Artificial Sequence: Synthetic peptide
GIVAIVVTCLAYYFMRFRRAFGEYS

SEQ ID NO: 15946 - protein, 25 aa, Artificial Sequence
  Description of Artificial Sequence: Synthetic peptide
IVAIVVTCLAYYFMRFRRAFGEYSH

SEQ ID NO: 15947 - protein, 25 aa, Artificial Sequence
  Description of Artificial Sequence: Synthetic peptide
GGIVAIVVTCLAYYFMRFRRAFGEY

SEQ ID NO: 15948 - protein, 25 aa, Artificial Sequence
  Description of Artificial Sequence: Synthetic peptide
LKVDTANPKTPKYKFVRIQPGQTFS

SEQ ID NO: 15949 - protein, 25 aa, Artificial Sequence
  Description of Artificial Sequence: Synthetic peptide
KTTEVVGDIILKPANNSLKITEEVG

SEQ ID NO: 15950 - protein, 25 aa, Artificial Sequence
  Description of Artificial Sequence: Synthetic peptide
VKTTEVVGDIILKPANNSLKITEEV

SEQ ID NO: 15951 - protein, 25 aa, Artificial Sequence
  Description of Artificial Sequence: Synthetic peptide
KVTLVFLFVAAIFYLITPVHVMSKH

SEQ ID NO: 15952 - protein, 25 aa, Artificial Sequence
  Description of Artificial Sequence: Synthetic peptide
TNVLEGSVAYESLRPDTRYVLMDGS

SEQ ID NO: 15953 - protein, 25 aa, Artificial Sequence
  Description of Artificial Sequence: Synthetic peptide
LLSMQGAVDINKLCEEMLDNRATLQ

SEQ ID NO: 15954 - protein, 25 aa, Artificial Sequence
  Description of Artificial Sequence: Synthetic peptide
SVLLSMQGAVDINKLCEEMLDNRAT

SEQ ID NO: 15955 - protein, 25 aa, Artificial Sequence
  Description of Artificial Sequence: Synthetic peptide
LSVLLSMQGAVDINKLCEEMLDNRA

SEQ ID NO: 15956 - protein, 25 aa, Artificial Sequence
  Description of Artificial Sequence: Synthetic peptide
VLLSMQGAVDINKLCEEMLDNRATL

SEQ ID NO: 15957 - protein, 25 aa, Artificial Sequence
  Description of Artificial Sequence: Synthetic peptide
DCVMYASAVVLLILMTARTVYDDGA

SEQ ID NO: 15958 - protein, 25 aa, Artificial Sequence
  Description of Artificial Sequence: Synthetic peptide
KDCVMYASAVVLLILMTARTVYDDG

SEQ ID NO: 15959 - protein, 25 aa, Artificial Sequence
  Description of Artificial Sequence: Synthetic peptide
HNDILLAKDTTEAFEKMVSLLSVLL

SEQ ID NO: 15960 - protein, 25 aa, Artificial Sequence
  Description of Artificial Sequence: Synthetic peptide
NDILLAKDTTEAFEKMVSLLSVLLS

SEQ ID NO: 15961 - protein, 25 aa, Artificial Sequence
  Description of Artificial Sequence: Synthetic peptide
IDHPNPKGFCDLKGKYVQIPTTCAN

SEQ ID NO: 15962 - protein, 25 aa, Artificial Sequence
  Description of Artificial Sequence: Synthetic peptide
DHPNPKGFCDLKGKYVQIPTTCAND

SEQ ID NO: 15963 - protein, 25 aa, Artificial Sequence
  Description of Artificial Sequence: Synthetic peptide
HPNPKGFCDLKGKYVQIPTTCANDP

SEQ ID NO: 15964 - protein, 25 aa, Artificial Sequence
  Description of Artificial Sequence: Synthetic peptide
HIDHPNPKGFCDLKGKYVQIPTTCA

SEQ ID NO: 15965 - protein, 25 aa, Artificial Sequence
  Description of Artificial Sequence: Synthetic peptide
DIEVTGDSCNNYMLTYNKVENMTPR

SEQ ID NO: 15966 - protein, 25 aa, Artificial Sequence
  Description of Artificial Sequence: Synthetic peptide
VLSTFISAARQGFVDSDVETKDVVE

SEQ ID NO: 15967 - protein, 25 aa, Artificial Sequence
  Description of Artificial Sequence: Synthetic peptide
NVLSTFISAARQGFVDSDVETKDVV

SEQ ID NO: 15968 - protein, 25 aa, Artificial Sequence
  Description of Artificial Sequence: Synthetic peptide
AGGIVAIVVTCLAYYFMRFRRAFGE

SEQ ID NO: 15969 - protein, 25 aa, Artificial Sequence
  Description of Artificial Sequence: Synthetic peptide
KLTCATTRQVVNVVTTKIALKGGKI

SEQ ID NO: 15970 - protein, 25 aa, Artificial Sequence
  Description of Artificial Sequence: Synthetic peptide
TCATTRQVVNVVTTKIALKGGKIVN

SEQ ID NO: 15971 - protein, 25 aa, Artificial Sequence
  Description of Artificial Sequence: Synthetic peptide
ATTRQVVNVVTTKIALKGGKIVNNW

SEQ ID NO: 15972 - protein, 25 aa, Artificial Sequence
  Description of Artificial Sequence: Synthetic peptide
FKLTCATTRQVVNVVTTKIALKGGK

SEQ ID NO: 15973 - protein, 25 aa, Artificial Sequence
  Description of Artificial Sequence: Synthetic peptide
CATTRQVVNVVTTKIALKGGKIVNN

SEQ ID NO: 15974 - protein, 25 aa, Artificial Sequence
  Description of Artificial Sequence: Synthetic peptide
LTCATTRQVVNVVTTKIALKGGKIV

SEQ ID NO: 15975 - protein, 25 aa, Artificial Sequence
  Description of Artificial Sequence: Synthetic peptide
VEKKKLDGFMGRIRSVYPVASPNEC

SEQ ID NO: 15976 - protein, 25 aa, Artificial Sequence
  Description of Artificial Sequence: Synthetic peptide
EKKKLDGFMGRIRSVYPVASPNECN

SEQ ID NO: 15977 - protein, 25 aa, Artificial Sequence
  Description of Artificial Sequence: Synthetic peptide
KKLDGFMGRIRSVYPVASPNECNQM

SEQ ID NO: 15978 - protein, 25 aa, Artificial Sequence
  Description of Artificial Sequence: Synthetic peptide
KKKLDGFMGRIRSVYPVASPNECNQ

SEQ ID NO: 15979 - protein, 25 aa, Artificial Sequence
  Description of Artificial Sequence: Synthetic peptide
AQVAKSHNIALIWNVKDFMSLSEQL

SEQ ID NO: 15980 - protein, 25 aa, Artificial Sequence
  Description of Artificial Sequence: Synthetic peptide
NAQVAKSHNIALIWNVKDFMSLSEQ

SEQ ID NO: 15981 - protein, 25 aa, Artificial Sequence
  Description of Artificial Sequence: Synthetic peptide
EYYHTTDPSFLGRYMSALNHTKKWK

SEQ ID NO: 15982 - protein, 25 aa, Artificial Sequence
  Description of Artificial Sequence: Synthetic peptide
DAVIKTLQPVSELLTPLGIDLDEWS

SEQ ID NO: 15983 - protein, 25 aa, Artificial Sequence
  Description of Artificial Sequence: Synthetic peptide
ADAVIKTLQPVSELLTPLGIDLDEW

SEQ ID NO: 15984 - protein, 25 aa, Artificial Sequence
  Description of Artificial Sequence: Synthetic peptide
VADAVIKTLQPVSELLTPLGIDLDE

SEQ ID NO: 15985 - protein, 25 aa, Artificial Sequence
  Description of Artificial Sequence: Synthetic peptide
WEIQQVVDADSKIVQLSEISMDNSP

SEQ ID NO: 15986 - protein, 25 aa, Artificial Sequence
  Description of Artificial Sequence: Synthetic peptide
KFKEGVEFLRDGWEIVKFISTCACE

SEQ ID NO: 15987 - protein, 25 aa, Artificial Sequence
  Description of Artificial Sequence: Synthetic peptide
PSVEQRKQDDKKIKACVEEVTTTLE

SEQ ID NO: 15988 - protein, 25 aa, Artificial Sequence
  Description of Artificial Sequence: Synthetic peptide
HVMSKHTDFSSEIIGYKAIDGGVTR

SEQ ID NO: 15989 - protein, 25 aa, Artificial Sequence
  Description of Artificial Sequence: Synthetic peptide
MSKHTDFSSEIIGYKAIDGGVTRDI

SEQ ID NO: 15990 - protein, 25 aa, Artificial Sequence
  Description of Artificial Sequence: Synthetic peptide
DFSSEIIGYKAIDGGVTRDIASTDT

SEQ ID NO: 15991 - protein, 25 aa, Artificial Sequence
  Description of Artificial Sequence: Synthetic peptide
TDFSSEIIGYKAIDGGVTRDIASTD

SEQ ID NO: 15992 - protein, 25 aa, Artificial Sequence
  Description of Artificial Sequence: Synthetic peptide
SKHTDFSSEIIGYKAIDGGVTRDIA

SEQ ID NO: 15993 - protein, 25 aa, Artificial Sequence
  Description of Artificial Sequence: Synthetic peptide
VMSKHTDFSSEIIGYKAIDGGVTRD

SEQ ID NO: 15994 - protein, 25 aa, Artificial Sequence
  Description of Artificial Sequence: Synthetic peptide
FSSEIIGYKAIDGGVTRDIASTDTC

SEQ ID NO: 15995 - protein, 25 aa, Artificial Sequence
  Description of Artificial Sequence: Synthetic peptide
HTDFSSEIIGYKAIDGGVTRDIAST

SEQ ID NO: 15996 - protein, 25 aa, Artificial Sequence
  Description of Artificial Sequence: Synthetic peptide
KHTDFSSEIIGYKAIDGGVTRDIAS

SEQ ID NO: 15997 - protein, 25 aa, Artificial Sequence
  Description of Artificial Sequence: Synthetic peptide
GSVAYESLRPDTRYVLMDGSIIQFP

SEQ ID NO: 15998 - protein, 25 aa, Artificial Sequence
  Description of Artificial Sequence: Synthetic peptide
EGSVAYESLRPDTRYVLMDGSIIQF

SEQ ID NO: 15999 - protein, 25 aa, Artificial Sequence
  Description of Artificial Sequence: Synthetic peptide
CYFGLFCLLNRYFRLTLGVYDYLVS

SEQ ID NO: 16000 - protein, 25 aa, Artificial Sequence
  Description of Artificial Sequence: Synthetic peptide
FCTCYFGLFCLLNRYFRLTLGVYDY

SEQ ID NO: 16001 - protein, 25 aa, Artificial Sequence
  Description of Artificial Sequence: Synthetic peptide
YFGLFCLLNRYFRLTLGVYDYLVST

SEQ ID NO: 16002 - protein, 25 aa, Artificial Sequence
  Description of Artificial Sequence: Synthetic peptide
FGLFCLLNRYFRLTLGVYDYLVSTQ

SEQ ID NO: 16003 - protein, 25 aa, Artificial Sequence
  Description of Artificial Sequence: Synthetic peptide
TCYFGLFCLLNRYFRLTLGVYDYLV

SEQ ID NO: 16004 - protein, 25 aa, Artificial Sequence
  Description of Artificial Sequence: Synthetic peptide
CTCYFGLFCLLNRYFRLTLGVYDYL

SEQ ID NO: 16005 - protein, 25 aa, Artificial Sequence
  Description of Artificial Sequence: Synthetic peptide
ARRVWTLMNVLTLVYKVYYGNALDQ

SEQ ID NO: 16006 - protein, 25 aa, Artificial Sequence
  Description of Artificial Sequence: Synthetic peptide
SVIYLYLTFYLTNDVSFLAHIQWMV

SEQ ID NO: 16007 - protein, 25 aa, Artificial Sequence
  Description of Artificial Sequence: Synthetic peptide
YSVIYLYLTFYLTNDVSFLAHIQWM

SEQ ID NO: 16008 - protein, 25 aa, Artificial Sequence
  Description of Artificial Sequence: Synthetic peptide
KGSLPINVIVFDGKSKCEESSAKSA

SEQ ID NO: 16009 - protein, 25 aa, Artificial Sequence
  Description of Artificial Sequence: Synthetic peptide
GSLPINVIVFDGKSKCEESSAKSAS

SEQ ID NO: 16010 - protein, 25 aa, Artificial Sequence
  Description of Artificial Sequence: Synthetic peptide
NTKGSLPINVIVFDGKSKCEESSAK

SEQ ID NO: 16011 - protein, 25 aa, Artificial Sequence
  Description of Artificial Sequence: Synthetic peptide
TKGSLPINVIVFDGKSKCEESSAKS

SEQ ID NO: 16012 - protein, 25 aa, Artificial Sequence
  Description of Artificial Sequence: Synthetic peptide
VAGGIVAIVVTCLAYYFMRFRRAFG

SEQ ID NO: 16013 - protein, 25 aa, Artificial Sequence
  Description of Artificial Sequence: Synthetic peptide
DVTKIKPHNSHEGKTFYVLPNDDTL

SEQ ID NO: 16014 - protein, 25 aa, Artificial Sequence
  Description of Artificial Sequence: Synthetic peptide
ADVTKIKPHNSHEGKTFYVLPNDDT

SEQ ID NO: 16015 - protein, 25 aa, Artificial Sequence
  Description of Artificial Sequence: Synthetic peptide
VRSIFSRTLETAQNSVRVLQKAAIT

SEQ ID NO: 16016 - protein, 25 aa, Artificial Sequence
  Description of Artificial Sequence: Synthetic peptide
LFQHANLDSCKRVLNVVCKTCGQQQ

SEQ ID NO: 16017 - protein, 25 aa, Artificial Sequence
  Description of Artificial Sequence: Synthetic peptide
DCVSFCYMHHMELPTGVHAGTDLEG

SEQ ID NO: 16018 - protein, 25 aa, Artificial Sequence
  Description of Artificial Sequence: Synthetic peptide
YDCVSFCYMHHMELPTGVHAGTDLE

SEQ ID NO: 16019 - protein, 25 aa, Artificial Sequence
  Description of Artificial Sequence: Synthetic peptide
NVYLAVFDKNLYDKLVSSFLEMKSE

SEQ ID NO: 16020 - protein, 25 aa, Artificial Sequence
  Description of Artificial Sequence: Synthetic peptide
YIICISTKHFYWFFSNYLKRRVVFN

SEQ ID NO: 16021 - protein, 25 aa, Artificial Sequence
  Description of Artificial Sequence: Synthetic peptide
VEVEKGVLPQLEQPYVFIKRSDART

SEQ ID NO: 16022 - protein, 25 aa, Artificial Sequence
  Description of Artificial Sequence: Synthetic peptide
VLLSVLQQLRVESSSKLWAQCVQLH

SEQ ID NO: 16023 - protein, 25 aa, Artificial Sequence
  Description of Artificial Sequence: Synthetic peptide
VVLLSVLQQLRVESSSKLWAQCVQL

SEQ ID NO: 16024 - protein, 25 aa, Artificial Sequence
  Description of Artificial Sequence: Synthetic peptide
VGDIILKPANNSLKITEEVGHTDLM

SEQ ID NO: 16025 - protein, 25 aa, Artificial Sequence
  Description of Artificial Sequence: Synthetic peptide
ARTVYDDGARRVWTLMNVLTLVYKV

SEQ ID NO: 16026 - protein, 25 aa, Artificial Sequence
  Description of Artificial Sequence: Synthetic peptide
TIEVNSFSGYLKLTDNVYIKNADIV

SEQ ID NO: 16027 - protein, 25 aa, Artificial Sequence
  Description of Artificial Sequence: Synthetic peptide
EVNSFSGYLKLTDNVYIKNADIVEE

SEQ ID NO: 16028 - protein, 25 aa, Artificial Sequence
  Description of Artificial Sequence: Synthetic peptide
IEVNSFSGYLKLTDNVYIKNADIVE

SEQ ID NO: 16029 - protein, 25 aa, Artificial Sequence
  Description of Artificial Sequence: Synthetic peptide
TLQQIELKFNPPALQDAYYRARAGE

SEQ ID NO: 16030 - protein, 25 aa, Artificial Sequence
  Description of Artificial Sequence: Synthetic peptide
LTLQQIELKFNPPALQDAYYRARAG

SEQ ID NO: 16031 - protein, 25 aa, Artificial Sequence
  Description of Artificial Sequence: Synthetic peptide
GVLTAVVIPTKKAGGTTEMLAKALR

SEQ ID NO: 16032 - protein, 25 aa, Artificial Sequence
  Description of Artificial Sequence: Synthetic peptide
KDGTCGLVEVEKGVLPQLEQPYVFI

SEQ ID NO: 16033 - protein, 25 aa, Artificial Sequence
  Description of Artificial Sequence: Synthetic peptide
GTCGLVEVEKGVLPQLEQPYVFIKR

SEQ ID NO: 16034 - protein, 25 aa, Artificial Sequence
  Description of Artificial Sequence: Synthetic peptide
DGTCGLVEVEKGVLPQLEQPYVFIK

SEQ ID NO: 16035 - protein, 25 aa, Artificial Sequence
  Description of Artificial Sequence: Synthetic peptide
ARQHLKDGTCGLVEVEKGVLPQLEQ

SEQ ID NO: 16036 - protein, 25 aa, Artificial Sequence
  Description of Artificial Sequence: Synthetic peptide
RQHLKDGTCGLVEVEKGVLPQLEQP

SEQ ID NO: 16037 - protein, 25 aa, Artificial Sequence
  Description of Artificial Sequence: Synthetic peptide
EARQHLKDGTCGLVEVEKGVLPQLE

SEQ ID NO: 16038 - protein, 25 aa, Artificial Sequence
  Description of Artificial Sequence: Synthetic peptide
EVVLKKLKKSLNVAKSEFDRDAAMQ

SEQ ID NO: 16039 - protein, 25 aa, Artificial Sequence
  Description of Artificial Sequence: Synthetic peptide
VVLKKLKKSLNVAKSEFDRDAAMQR

SEQ ID NO: 16040 - protein, 25 aa, Artificial Sequence
  Description of Artificial Sequence: Synthetic peptide
SEVVLKKLKKSLNVAKSEFDRDAAM

SEQ ID NO: 16041 - protein, 25 aa, Artificial Sequence
  Description of Artificial Sequence: Synthetic peptide
VLKKLKKSLNVAKSEFDRDAAMQRK

SEQ ID NO: 16042 - protein, 25 aa, Artificial Sequence
  Description of Artificial Sequence: Synthetic peptide
KLKKSLNVAKSEFDRDAAMQRKLEK

SEQ ID NO: 16043 - protein, 25 aa, Artificial Sequence
  Description of Artificial Sequence: Synthetic peptide
NIVTRCLNRVCTNYMPYFFTLLLQL

SEQ ID NO: 16044 - protein, 25 aa, Artificial Sequence
  Description of Artificial Sequence: Synthetic peptide
TTTNIVTRCLNRVCTNYMPYFFTLL

SEQ ID NO: 16045 - protein, 25 aa, Artificial Sequence
  Description of Artificial Sequence: Synthetic peptide
IVTRCLNRVCTNYMPYFFTLLLQLC

SEQ ID NO: 16046 - protein, 25 aa, Artificial Sequence
  Description of Artificial Sequence: Synthetic peptide
TNIVTRCLNRVCTNYMPYFFTLLLQ

SEQ ID NO: 16047 - protein, 25 aa, Artificial Sequence
  Description of Artificial Sequence: Synthetic peptide
TTNIVTRCLNRVCTNYMPYFFTLLL

SEQ ID NO: 16048 - protein, 25 aa, Artificial Sequence
  Description of Artificial Sequence: Synthetic peptide
KGTHHWLLLTILTSLLVLVQSTQWS

SEQ ID NO: 16049 - protein, 25 aa, Artificial Sequence
  Description of Artificial Sequence: Synthetic peptide
GTHHWLLLTILTSLLVLVQSTQWSL

SEQ ID NO: 16050 - protein, 25 aa, Artificial Sequence
  Description of Artificial Sequence: Synthetic peptide
TFFPDLNGDVVAIDYKHYTPSFKKG

SEQ ID NO: 16051 - protein, 25 aa, Artificial Sequence
  Description of Artificial Sequence: Synthetic peptide
PDLNGDVVAIDYKHYTPSFKKGAKL

SEQ ID NO: 16052 - protein, 25 aa, Artificial Sequence
  Description of Artificial Sequence: Synthetic peptide
FPDLNGDVVAIDYKHYTPSFKKGAK

SEQ ID NO: 16053 - protein, 25 aa, Artificial Sequence
  Description of Artificial Sequence: Synthetic peptide
DLNGDVVAIDYKHYTPSFKKGAKLL

SEQ ID NO: 16054 - protein, 25 aa, Artificial Sequence
  Description of Artificial Sequence: Synthetic peptide
FFPDLNGDVVAIDYKHYTPSFKKGA

SEQ ID NO: 16055 - protein, 25 aa, Artificial Sequence
  Description of Artificial Sequence: Synthetic peptide
LNGDVVAIDYKHYTPSFKKGAKLLH

SEQ ID NO: 16056 - protein, 25 aa, Artificial Sequence
  Description of Artificial Sequence: Synthetic peptide
VAYFNMVYMPASWVMRIMTWLDMVD

SEQ ID NO: 16057 - protein, 25 aa, Artificial Sequence
  Description of Artificial Sequence: Synthetic peptide
AYFNMVYMPASWVMRIMTWLDMVDT

SEQ ID NO: 16058 - protein, 25 aa, Artificial Sequence
  Description of Artificial Sequence: Synthetic peptide
VSSFLEMKSEKQVEQKIAEIPKEEV

SEQ ID NO: 16059 - protein, 25 aa, Artificial Sequence
  Description of Artificial Sequence: Synthetic peptide
YNRYLALYNKYKYFSGAMDTTSYRE

SEQ ID NO: 16060 - protein, 25 aa, Artificial Sequence
  Description of Artificial Sequence: Synthetic peptide
QYNRYLALYNKYKYFSGAMDTTSYR

SEQ ID NO: 16061 - protein, 25 aa, Artificial Sequence
  Description of Artificial Sequence: Synthetic peptide
GRWVLNNDYYRSLPGVFCGVDAVNL

SEQ ID NO: 16062 - protein, 25 aa, Artificial Sequence
  Description of Artificial Sequence: Synthetic peptide
RWVLNNDYYRSLPGVFCGVDAVNLL

SEQ ID NO: 16063 - protein, 25 aa, Artificial Sequence
  Description of Artificial Sequence: Synthetic peptide
KGEDIQLLKSAYENFNQHEVLLAPL

SEQ ID NO: 16064 - protein, 25 aa, Artificial Sequence
  Description of Artificial Sequence: Synthetic peptide
NKGEDIQLLKSAYENFNQHEVLLAP

SEQ ID NO: 16065 - protein, 25 aa, Artificial Sequence
  Description of Artificial Sequence: Synthetic peptide
VQSKMSDVKCTSVVLLSVLQQLRVE

SEQ ID NO: 16066 - protein, 25 aa, Artificial Sequence
  Description of Artificial Sequence: Synthetic peptide
SKMSDVKCTSVVLLSVLQQLRVESS

SEQ ID NO: 16067 - protein, 25 aa, Artificial Sequence
  Description of Artificial Sequence: Synthetic peptide
QSKMSDVKCTSVVLLSVLQQLRVES

SEQ ID NO: 16068 - protein, 25 aa, Artificial Sequence
  Description of Artificial Sequence: Synthetic peptide
KGFCDLKGKYVQIPTTCANDPVGFT

SEQ ID NO: 16069 - protein, 25 aa, Artificial Sequence
  Description of Artificial Sequence: Synthetic peptide
GFCDLKGKYVQIPTTCANDPVGFTL

SEQ ID NO: 16070 - protein, 25 aa, Artificial Sequence
  Description of Artificial Sequence: Synthetic peptide
FCDLKGKYVQIPTTCANDPVGFTLK

SEQ ID NO: 16071 - protein, 25 aa, Artificial Sequence
  Description of Artificial Sequence: Synthetic peptide
PKGFCDLKGKYVQIPTTCANDPVGF

SEQ ID NO: 16072 - protein, 25 aa, Artificial Sequence
  Description of Artificial Sequence: Synthetic peptide
CDLKGKYVQIPTTCANDPVGFTLKN

SEQ ID NO: 16073 - protein, 25 aa, Artificial Sequence
  Description of Artificial Sequence: Synthetic peptide
SWLMWLIINLVQMAPISAMVRMYIF

SEQ ID NO: 16074 - protein, 25 aa, Artificial Sequence
  Description of Artificial Sequence: Synthetic peptide
LTAVVIPTKKAGGTTEMLAKALRKV

SEQ ID NO: 16075 - protein, 25 aa, Artificial Sequence
  Description of Artificial Sequence: Synthetic peptide
VLTAVVIPTKKAGGTTEMLAKALRK

SEQ ID NO: 16076 - protein, 25 aa, Artificial Sequence
  Description of Artificial Sequence: Synthetic peptide
HVVGPNVNKGEDIQLLKSAYENFNQ

SEQ ID NO: 16077 - protein, 25 aa, Artificial Sequence
  Description of Artificial Sequence: Synthetic peptide
TQYNRYLALYNKYKYFSGAMDTTSY

SEQ ID NO: 16078 - protein, 25 aa, Artificial Sequence
  Description of Artificial Sequence: Synthetic peptide
LTQYNRYLALYNKYKYFSGAMDTTS

SEQ ID NO: 16079 - protein, 25 aa, Artificial Sequence
  Description of Artificial Sequence: Synthetic peptide
YHNESGLKTILRKGGRTIAFGGCVF

SEQ ID NO: 16080 - protein, 25 aa, Artificial Sequence
  Description of Artificial Sequence: Synthetic peptide
LAEYHNESGLKTILRKGGRTIAFGG

SEQ ID NO: 16081 - protein, 25 aa, Artificial Sequence
  Description of Artificial Sequence: Synthetic peptide
AEYHNESGLKTILRKGGRTIAFGGC

SEQ ID NO: 16082 - protein, 25 aa, Artificial Sequence
  Description of Artificial Sequence: Synthetic peptide
EYHNESGLKTILRKGGRTIAFGGCV

SEQ ID NO: 16083 - protein, 25 aa, Artificial Sequence
  Description of Artificial Sequence: Synthetic peptide
MWLIINLVQMAPISAMVRMYIFFAS

SEQ ID NO: 16084 - protein, 25 aa, Artificial Sequence
  Description of Artificial Sequence: Synthetic peptide
QTMLFTMLRKLDNDALNNIINNARD

SEQ ID NO: 16085 - protein, 25 aa, Artificial Sequence
  Description of Artificial Sequence: Synthetic peptide
MQTMLFTMLRKLDNDALNNIINNAR

SEQ ID NO: 16086 - protein, 25 aa, Artificial Sequence
  Description of Artificial Sequence: Synthetic peptide
PYIVGDVVQEGVLTAVVIPTKKAGG

SEQ ID NO: 16087 - protein, 25 aa, Artificial Sequence
  Description of Artificial Sequence: Synthetic peptide
YIVGDVVQEGVLTAVVIPTKKAGGT

SEQ ID NO: 16088 - protein, 25 aa, Artificial Sequence
  Description of Artificial Sequence: Synthetic peptide
TGTGQAITVTPEANMDQESFGGASC

SEQ ID NO: 16089 - protein, 25 aa, Artificial Sequence
  Description of Artificial Sequence: Synthetic peptide
DSCNNYMLTYNKVENMTPRDLGACI

SEQ ID NO: 16090 - protein, 25 aa, Artificial Sequence
  Description of Artificial Sequence: Synthetic peptide
LFDESGEFKLASHMYCSFYPPDEDE

SEQ ID NO: 16091 - protein, 25 aa, Artificial Sequence
  Description of Artificial Sequence: Synthetic peptide
FDESGEFKLASHMYCSFYPPDEDEE

SEQ ID NO: 16092 - protein, 25 aa, Artificial Sequence
  Description of Artificial Sequence: Synthetic peptide
YLFDESGEFKLASHMYCSFYPPDED

SEQ ID NO: 16093 - protein, 25 aa, Artificial Sequence
  Description of Artificial Sequence: Synthetic peptide
YYLFDESGEFKLASHMYCSFYPPDE

SEQ ID NO: 16094 - protein, 25 aa, Artificial Sequence
  Description of Artificial Sequence: Synthetic peptide
FLGRYMSALNHTKKWKYPQVNGLTS

SEQ ID NO: 16095 - protein, 25 aa, Artificial Sequence
  Description of Artificial Sequence: Synthetic peptide
LGRYMSALNHTKKWKYPQVNGLTSI

SEQ ID NO: 16096 - protein, 25 aa, Artificial Sequence
  Description of Artificial Sequence: Synthetic peptide
VVDYGARFYFYTSKTTVASLINTLN

SEQ ID NO: 16097 - protein, 25 aa, Artificial Sequence
  Description of Artificial Sequence: Synthetic peptide
VDYGARFYFYTSKTTVASLINTLND

SEQ ID NO: 16098 - protein, 25 aa, Artificial Sequence
  Description of Artificial Sequence: Synthetic peptide
DYGARFYFYTSKTTVASLINTLNDL

SEQ ID NO: 16099 - protein, 25 aa, Artificial Sequence
  Description of Artificial Sequence: Synthetic peptide
EGVVDYGARFYFYTSKTTVASLINT

SEQ ID NO: 16100 - protein, 25 aa, Artificial Sequence
  Description of Artificial Sequence: Synthetic peptide
GVVDYGARFYFYTSKTTVASLINTL

SEQ ID NO: 16101 - protein, 25 aa, Artificial Sequence
  Description of Artificial Sequence: Synthetic peptide
QEAYEQAVANGDSEVVLKKLKKSLN

SEQ ID NO: 16102 - protein, 25 aa, Artificial Sequence
  Description of Artificial Sequence: Synthetic peptide
KMLCTHTGTGQAITVTPEANMDQES

SEQ ID NO: 16103 - protein, 25 aa, Artificial Sequence
  Description of Artificial Sequence: Synthetic peptide
CDTFCAGSTFISDEVARDLSLQFKR

SEQ ID NO: 16104 - protein, 25 aa, Artificial Sequence
  Description of Artificial Sequence: Synthetic peptide
VNCDTFCAGSTFISDEVARDLSLQF

SEQ ID NO: 16105 - protein, 25 aa, Artificial Sequence
  Description of Artificial Sequence: Synthetic peptide
NCDTFCAGSTFISDEVARDLSLQFK

SEQ ID NO: 16106 - protein, 25 aa, Artificial Sequence
  Description of Artificial Sequence: Synthetic peptide
MSALNHTKKWKYPQVNGLTSIKWAD

SEQ ID NO: 16107 - protein, 25 aa, Artificial Sequence
  Description of Artificial Sequence: Synthetic peptide
YMSALNHTKKWKYPQVNGLTSIKWA

SEQ ID NO: 16108 - protein, 25 aa, Artificial Sequence
  Description of Artificial Sequence: Synthetic peptide
SALNHTKKWKYPQVNGLTSIKWADN

SEQ ID NO: 16109 - protein, 25 aa, Artificial Sequence
  Description of Artificial Sequence: Synthetic peptide
DVVAIDYKHYTPSFKKGAKLLHKPI

SEQ ID NO: 16110 - protein, 25 aa, Artificial Sequence
  Description of Artificial Sequence: Synthetic peptide
VVAIDYKHYTPSFKKGAKLLHKPIV

SEQ ID NO: 16111 - protein, 25 aa, Artificial Sequence
  Description of Artificial Sequence: Synthetic peptide
NGDVVAIDYKHYTPSFKKGAKLLHK

SEQ ID NO: 16112 - protein, 25 aa, Artificial Sequence
  Description of Artificial Sequence: Synthetic peptide
ASFDNFKFVCDNIKFADDLNQLTGY

SEQ ID NO: 16113 - protein, 25 aa, Artificial Sequence
  Description of Artificial Sequence: Synthetic peptide
FDNFKFVCDNIKFADDLNQLTGYKK

SEQ ID NO: 16114 - protein, 25 aa, Artificial Sequence
  Description of Artificial Sequence: Synthetic peptide
DNFKFVCDNIKFADDLNQLTGYKKP

SEQ ID NO: 16115 - protein, 25 aa, Artificial Sequence
  Description of Artificial Sequence: Synthetic peptide
SFDNFKFVCDNIKFADDLNQLTGYK

SEQ ID NO: 16116 - protein, 25 aa, Artificial Sequence
  Description of Artificial Sequence: Synthetic peptide
PEEHFIETISLAGSYKDWSYSGQST

SEQ ID NO: 16117 - protein, 25 aa, Artificial Sequence
  Description of Artificial Sequence: Synthetic peptide
LKPVLDWLEEKFKEGVEFLRDGWEI

SEQ ID NO: 16118 - protein, 25 aa, Artificial Sequence
  Description of Artificial Sequence: Synthetic peptide
KLKPVLDWLEEKFKEGVEFLRDGWE

SEQ ID NO: 16119 - protein, 25 aa, Artificial Sequence
  Description of Artificial Sequence: Synthetic peptide
TAQNSVRVLQKAAITILDGISQYSL

SEQ ID NO: 16120 - protein, 25 aa, Artificial Sequence
  Description of Artificial Sequence: Synthetic peptide
ETAQNSVRVLQKAAITILDGISQYS

SEQ ID NO: 16121 - protein, 25 aa, Artificial Sequence
  Description of Artificial Sequence: Synthetic peptide
GQPITNCVKMLCTHTGTGQAITVTP

SEQ ID NO: 16122 - protein, 25 aa, Artificial Sequence
  Description of Artificial Sequence: Synthetic peptide
GKASCTLSEQLDFIDTKRGVYCCRE

SEQ ID NO: 16123 - protein, 25 aa, Artificial Sequence
  Description of Artificial Sequence: Synthetic peptide
AKNTVKSVGKFCLEASFNYLKSPNF

SEQ ID NO: 16124 - protein, 25 aa, Artificial Sequence
  Description of Artificial Sequence: Synthetic peptide
IAKNTVKSVGKFCLEASFNYLKSPN

SEQ ID NO: 16125 - protein, 25 aa, Artificial Sequence
  Description of Artificial Sequence: Synthetic peptide
SAVKRTIKGTHHWLLLTILTSLLVL

SEQ ID NO: 16126 - protein, 25 aa, Artificial Sequence
  Description of Artificial Sequence: Synthetic peptide
DYDCVSFCYMHHMELPTGVHAGTDL

SEQ ID NO: 16127 - protein, 25 aa, Artificial Sequence
  Description of Artificial Sequence: Synthetic peptide
SWVMRIMTWLDMVDTSLSGFKLKDC

SEQ ID NO: 16128 - protein, 25 aa, Artificial Sequence
  Description of Artificial Sequence: Synthetic peptide
VMRIMTWLDMVDTSLSGFKLKDCVM

SEQ ID NO: 16129 - protein, 25 aa, Artificial Sequence
  Description of Artificial Sequence: Synthetic peptide
WVMRIMTWLDMVDTSLSGFKLKDCV

SEQ ID NO: 16130 - protein, 25 aa, Artificial Sequence
  Description of Artificial Sequence: Synthetic peptide
IVEEAKKVKPTVVVNAANVYLKHGG

SEQ ID NO: 16131 - protein, 25 aa, Artificial Sequence
  Description of Artificial Sequence: Synthetic peptide
DIVEEAKKVKPTVVVNAANVYLKHG

SEQ ID NO: 16132 - protein, 25 aa, Artificial Sequence
  Description of Artificial Sequence: Synthetic peptide
GLMLLEIKDTEKYCALAPNMMVTNN

SEQ ID NO: 16133 - protein, 25 aa, Artificial Sequence
  Description of Artificial Sequence: Synthetic peptide
VKSREETGLLMPLKAPKEIIFLEGE

SEQ ID NO: 16134 - protein, 25 aa, Artificial Sequence
  Description of Artificial Sequence: Synthetic peptide
SREETGLLMPLKAPKEIIFLEGETL

SEQ ID NO: 16135 - protein, 25 aa, Artificial Sequence
  Description of Artificial Sequence: Synthetic peptide
EETGLLMPLKAPKEIIFLEGETLPT

SEQ ID NO: 16136 - protein, 25 aa, Artificial Sequence
  Description of Artificial Sequence: Synthetic peptide
REETGLLMPLKAPKEIIFLEGETLP

SEQ ID NO: 16137 - protein, 25 aa, Artificial Sequence
  Description of Artificial Sequence: Synthetic peptide
KSREETGLLMPLKAPKEIIFLEGET

SEQ ID NO: 16138 - protein, 25 aa, Artificial Sequence
  Description of Artificial Sequence: Synthetic peptide
PTEVLTEEVVLKTGDLQPLEQPTSE

SEQ ID NO: 16139 - protein, 25 aa, Artificial Sequence
  Description of Artificial Sequence: Synthetic peptide
SEGLNDNLLEILQKEKVNINIVGDF

SEQ ID NO: 16140 - protein, 25 aa, Artificial Sequence
  Description of Artificial Sequence: Synthetic peptide
EGSEGLNDNLLEILQKEKVNINIVG

SEQ ID NO: 16141 - protein, 25 aa, Artificial Sequence
  Description of Artificial Sequence: Synthetic peptide
VVGEGSEGLNDNLLEILQKEKVNIN

SEQ ID NO: 16142 - protein, 25 aa, Artificial Sequence
  Description of Artificial Sequence: Synthetic peptide
EGLNDNLLEILQKEKVNINIVGDFK

SEQ ID NO: 16143 - protein, 25 aa, Artificial Sequence
  Description of Artificial Sequence: Synthetic peptide
GEGSEGLNDNLLEILQKEKVNINIV

SEQ ID NO: 16144 - protein, 25 aa, Artificial Sequence
  Description of Artificial Sequence: Synthetic peptide
VGEGSEGLNDNLLEILQKEKVNINI

SEQ ID NO: 16145 - protein, 25 aa, Artificial Sequence
  Description of Artificial Sequence: Synthetic peptide
GSEGLNDNLLEILQKEKVNINIVGD

SEQ ID NO: 16146 - protein, 25 aa, Artificial Sequence
  Description of Artificial Sequence: Synthetic peptide
TGVVGEGSEGLNDNLLEILQKEKVN

SEQ ID NO: 16147 - protein, 25 aa, Artificial Sequence
  Description of Artificial Sequence: Synthetic peptide
GVVGEGSEGLNDNLLEILQKEKVNI

SEQ ID NO: 16148 - protein, 25 aa, Artificial Sequence
  Description of Artificial Sequence: Synthetic peptide
AVKRTIKGTHHWLLLTILTSLLVLV

SEQ ID NO: 16149 - protein, 25 aa, Artificial Sequence
  Description of Artificial Sequence: Synthetic peptide
KRTIKGTHHWLLLTILTSLLVLVQS

SEQ ID NO: 16150 - protein, 25 aa, Artificial Sequence
  Description of Artificial Sequence: Synthetic peptide
VKRTIKGTHHWLLLTILTSLLVLVQ

SEQ ID NO: 16151 - protein, 25 aa, Artificial Sequence
  Description of Artificial Sequence: Synthetic peptide
VYMPASWVMRIMTWLDMVDTSLSGF

SEQ ID NO: 16152 - protein, 25 aa, Artificial Sequence
  Description of Artificial Sequence: Synthetic peptide
MVYMPASWVMRIMTWLDMVDTSLSG

SEQ ID NO: 16153 - protein, 25 aa, Artificial Sequence
  Description of Artificial Sequence: Synthetic peptide
NMVYMPASWVMRIMTWLDMVDTSLS

SEQ ID NO: 16154 - protein, 25 aa, Artificial Sequence
  Description of Artificial Sequence: Synthetic peptide
LDMCASLKELLQNGMNGRTILGSAL

SEQ ID NO: 16155 - protein, 25 aa, Artificial Sequence
  Description of Artificial Sequence: Synthetic peptide
GGRFVLALLSDLQDLKWARFPKSDG

SEQ ID NO: 16156 - protein, 25 aa, Artificial Sequence
  Description of Artificial Sequence: Synthetic peptide
PISAMVRMYIFFASFYYVWKSYVHV

SEQ ID NO: 16157 - protein, 25 aa, Artificial Sequence
  Description of Artificial Sequence: Synthetic peptide
ISAMVRMYIFFASFYYVWKSYVHVV

SEQ ID NO: 16158 - protein, 25 aa, Artificial Sequence
  Description of Artificial Sequence: Synthetic peptide
QTGIAVLDMCASLKELLQNGMNGRT

SEQ ID NO: 16159 - protein, 25 aa, Artificial Sequence
  Description of Artificial Sequence: Synthetic peptide
TGIAVLDMCASLKELLQNGMNGRTI

SEQ ID NO: 16160 - protein, 25 aa, Artificial Sequence
  Description of Artificial Sequence: Synthetic peptide
SAQTGIAVLDMCASLKELLQNGMNG

SEQ ID NO: 16161 - protein, 25 aa, Artificial Sequence
  Description of Artificial Sequence: Synthetic peptide
AQTGIAVLDMCASLKELLQNGMNGR

SEQ ID NO: 16162 - protein, 25 aa, Artificial Sequence
  Description of Artificial Sequence: Synthetic peptide
LSAQTGIAVLDMCASLKELLQNGMN

SEQ ID NO: 16163 - protein, 25 aa, Artificial Sequence
  Description of Artificial Sequence: Synthetic peptide
KGLDYKAFKQIVESCGNFKVTKGKA

SEQ ID NO: 16164 - protein, 25 aa, Artificial Sequence
  Description of Artificial Sequence: Synthetic peptide
VKGLDYKAFKQIVESCGNFKVTKGK

SEQ ID NO: 16165 - protein, 25 aa, Artificial Sequence
  Description of Artificial Sequence: Synthetic peptide
LKLRSDVLLPLTQYNRYLALYNKYK

SEQ ID NO: 16166 - protein, 25 aa, Artificial Sequence
  Description of Artificial Sequence: Synthetic peptide
LRSDVLLPLTQYNRYLALYNKYKYF

SEQ ID NO: 16167 - protein, 25 aa, Artificial Sequence
  Description of Artificial Sequence: Synthetic peptide
KLRSDVLLPLTQYNRYLALYNKYKY

SEQ ID NO: 16168 - protein, 25 aa, Artificial Sequence
  Description of Artificial Sequence: Synthetic peptide
FVDDIVKTDGTLMIERFVSLAIDAY

SEQ ID NO: 16169 - protein, 25 aa, Artificial Sequence
  Description of Artificial Sequence: Synthetic peptide
LTKGTLEPEYFNSVCRLMKTIGPDM

SEQ ID NO: 16170 - protein, 25 aa, Artificial Sequence
  Description of Artificial Sequence: Synthetic peptide
KGTLEPEYFNSVCRLMKTIGPDMFL

SEQ ID NO: 16171 - protein, 25 aa, Artificial Sequence
  Description of Artificial Sequence: Synthetic peptide
QIYKTPPIKDFGGFNFSQILPDPSK

SEQ ID NO: 16172 - protein, 25 aa, Artificial Sequence
  Description of Artificial Sequence: Synthetic peptide
IYKTPPIKDFGGFNFSQILPDPSKP

SEQ ID NO: 16173 - protein, 25 aa, Artificial Sequence
  Description of Artificial Sequence: Synthetic peptide
GTLEPEYFNSVCRLMKTIGPDMFLG

SEQ ID NO: 16174 - protein, 25 aa, Artificial Sequence
  Description of Artificial Sequence: Synthetic peptide
FTVEKGIYQTSNFRVQPTESIVRFP

SEQ ID NO: 16175 - protein, 25 aa, Artificial Sequence
  Description of Artificial Sequence: Synthetic peptide
KSFTVEKGIYQTSNFRVQPTESIVR

SEQ ID NO: 16176 - protein, 25 aa, Artificial Sequence
  Description of Artificial Sequence: Synthetic peptide
SFTVEKGIYQTSNFRVQPTESIVRF

SEQ ID NO: 16177 - protein, 25 aa, Artificial Sequence
  Description of Artificial Sequence: Synthetic peptide
SFKELLVYAADPAMHAASGNLLLDK

SEQ ID NO: 16178 - protein, 25 aa, Artificial Sequence
  Description of Artificial Sequence: Synthetic peptide
MAGNGGDAALALLLLDRLNQLESKM

SEQ ID NO: 16179 - protein, 25 aa, Artificial Sequence
  Description of Artificial Sequence: Synthetic peptide
NGGDAALALLLLDRLNQLESKMSGK

SEQ ID NO: 16180 - protein, 25 aa, Artificial Sequence
  Description of Artificial Sequence: Synthetic peptide
AGNGGDAALALLLLDRLNQLESKMS

SEQ ID NO: 16181 - protein, 25 aa, Artificial Sequence
  Description of Artificial Sequence: Synthetic peptide
GNGGDAALALLLLDRLNQLESKMSG

SEQ ID NO: 16182 - protein, 25 aa, Artificial Sequence
  Description of Artificial Sequence: Synthetic peptide
EKGIYQTSNFRVQPTESIVRFPNIT

SEQ ID NO: 16183 - protein, 25 aa, Artificial Sequence
  Description of Artificial Sequence: Synthetic peptide
RCPAEIVDTVSALVYDNKLKAHKDK

SEQ ID NO: 16184 - protein, 25 aa, Artificial Sequence
  Description of Artificial Sequence: Synthetic peptide
TNAGDYILANTCTERLKLFAAETLK

SEQ ID NO: 16185 - protein, 25 aa, Artificial Sequence
  Description of Artificial Sequence: Synthetic peptide
NAGDYILANTCTERLKLFAAETLKA

SEQ ID NO: 16186 - protein, 25 aa, Artificial Sequence
  Description of Artificial Sequence: Synthetic peptide
SSRLSFKELLVYAADPAMHAASGNL

SEQ ID NO: 16187 - protein, 25 aa, Artificial Sequence
  Description of Artificial Sequence: Synthetic peptide
PLNRNYVFTGYRVTKNSKVQIGEYT

SEQ ID NO: 16188 - protein, 25 aa, Artificial Sequence
  Description of Artificial Sequence: Synthetic peptide
VFTGYRVTKNSKVQIGEYTFEKGDY

SEQ ID NO: 16189 - protein, 25 aa, Artificial Sequence
  Description of Artificial Sequence: Synthetic peptide
RNYVFTGYRVTKNSKVQIGEYTFEK

SEQ ID NO: 16190 - protein, 25 aa, Artificial Sequence
  Description of Artificial Sequence: Synthetic peptide
NRNYVFTGYRVTKNSKVQIGEYTFE

SEQ ID NO: 16191 - protein, 25 aa, Artificial Sequence
  Description of Artificial Sequence: Synthetic peptide
YVFTGYRVTKNSKVQIGEYTFEKGD

SEQ ID NO: 16192 - protein, 25 aa, Artificial Sequence
  Description of Artificial Sequence: Synthetic peptide
LNRNYVFTGYRVTKNSKVQIGEYTF

SEQ ID NO: 16193 - protein, 25 aa, Artificial Sequence
  Description of Artificial Sequence: Synthetic peptide
FTGYRVTKNSKVQIGEYTFEKGDYG

SEQ ID NO: 16194 - protein, 25 aa, Artificial Sequence
  Description of Artificial Sequence: Synthetic peptide
NYVFTGYRVTKNSKVQIGEYTFEKG

SEQ ID NO: 16195 - protein, 25 aa, Artificial Sequence
  Description of Artificial Sequence: Synthetic peptide
WVYKQFDTYNLWNTFTRLQSLENVA

SEQ ID NO: 16196 - protein, 25 aa, Artificial Sequence
  Description of Artificial Sequence: Synthetic peptide
VYKQFDTYNLWNTFTRLQSLENVAF

SEQ ID NO: 16197 - protein, 25 aa, Artificial Sequence
  Description of Artificial Sequence: Synthetic peptide
EIPRRNVATLQAENVTGLFKDCSKV

SEQ ID NO: 16198 - protein, 25 aa, Artificial Sequence
  Description of Artificial Sequence: Synthetic peptide
LVKPSFYVYSRVKNLNSSRVPDLLV

SEQ ID NO: 16199 - protein, 25 aa, Artificial Sequence
  Description of Artificial Sequence: Synthetic peptide
SLVKPSFYVYSRVKNLNSSRVPDLL

SEQ ID NO: 16200 - protein, 25 aa, Artificial Sequence
  Description of Artificial Sequence: Synthetic peptide
DYNYKLPDDFTGCVIAWNSNNLDSK

SEQ ID NO: 16201 - protein, 25 aa, Artificial Sequence
  Description of Artificial Sequence: Synthetic peptide
IPKDMTYRRLISMMGFKMNYQVNGY

SEQ ID NO: 16202 - protein, 25 aa, Artificial Sequence
  Description of Artificial Sequence: Synthetic peptide
IKPVPEVKILNNLGVDIAANTVIWD

SEQ ID NO: 16203 - protein, 25 aa, Artificial Sequence
  Description of Artificial Sequence: Synthetic peptide
NIKPVPEVKILNNLGVDIAANTVIW

SEQ ID NO: 16204 - protein, 25 aa, Artificial Sequence
  Description of Artificial Sequence: Synthetic peptide
KRNIKPVPEVKILNNLGVDIAANTV

SEQ ID NO: 16205 - protein, 25 aa, Artificial Sequence
  Description of Artificial Sequence: Synthetic peptide
RNIKPVPEVKILNNLGVDIAANTVI

SEQ ID NO: 16206 - protein, 25 aa, Artificial Sequence
  Description of Artificial Sequence: Synthetic peptide
NFKDQVILLNKHIDAYKTFPPTEPK

SEQ ID NO: 16207 - protein, 25 aa, Artificial Sequence
  Description of Artificial Sequence: Synthetic peptide
FKDQVILLNKHIDAYKTFPPTEPKK

SEQ ID NO: 16208 - protein, 25 aa, Artificial Sequence
  Description of Artificial Sequence: Synthetic peptide
PNFKDQVILLNKHIDAYKTFPPTEP

SEQ ID NO: 16209 - protein, 25 aa, Artificial Sequence
  Description of Artificial Sequence: Synthetic peptide
GLALYYPSARIVYTACSHAAVDALC

SEQ ID NO: 16210 - protein, 25 aa, Artificial Sequence
  Description of Artificial Sequence: Synthetic peptide
KVSIWNLDYIINLIIKNLSKSLTEN

SEQ ID NO: 16211 - protein, 25 aa, Artificial Sequence
  Description of Artificial Sequence: Synthetic peptide
WNLDYIINLIIKNLSKSLTENKYSQ

SEQ ID NO: 16212 - protein, 25 aa, Artificial Sequence
  Description of Artificial Sequence: Synthetic peptide
IWNLDYIINLIIKNLSKSLTENKYS

SEQ ID NO: 16213 - protein, 25 aa, Artificial Sequence
  Description of Artificial Sequence: Synthetic peptide
VSIWNLDYIINLIIKNLSKSLTENK

SEQ ID NO: 16214 - protein, 25 aa, Artificial Sequence
  Description of Artificial Sequence: Synthetic peptide
SIWNLDYIINLIIKNLSKSLTENKY

SEQ ID NO: 16215 - protein, 25 aa, Artificial Sequence
  Description of Artificial Sequence: Synthetic peptide
NMFITREEAIRHVRAWIGFDVEGCH

SEQ ID NO: 16216 - protein, 25 aa, Artificial Sequence
  Description of Artificial Sequence: Synthetic peptide
PNMFITREEAIRHVRAWIGFDVEGC

SEQ ID NO: 16217 - protein, 25 aa, Artificial Sequence
  Description of Artificial Sequence: Synthetic peptide
FITREEAIRHVRAWIGFDVEGCHAT

SEQ ID NO: 16218 - protein, 25 aa, Artificial Sequence
  Description of Artificial Sequence: Synthetic peptide
ITREEAIRHVRAWIGFDVEGCHATR

SEQ ID NO: 16219 - protein, 25 aa, Artificial Sequence
  Description of Artificial Sequence: Synthetic peptide
MFITREEAIRHVRAWIGFDVEGCHA

SEQ ID NO: 16220 - protein, 25 aa, Artificial Sequence
  Description of Artificial Sequence: Synthetic peptide
AKRNIKPVPEVKILNNLGVDIAANT

SEQ ID NO: 16221 - protein, 25 aa, Artificial Sequence
  Description of Artificial Sequence: Synthetic peptide
ADSNGTITVEELKKLLEQWNLVIGF

SEQ ID NO: 16222 - protein, 25 aa, Artificial Sequence
  Description of Artificial Sequence: Synthetic peptide
PDDFTGCVIAWNSNNLDSKVGGNYN

SEQ ID NO: 16223 - protein, 25 aa, Artificial Sequence
  Description of Artificial Sequence: Synthetic peptide
ITRFQTLLALHRSYLTPGDSSSGWT

SEQ ID NO: 16224 - protein, 25 aa, Artificial Sequence
  Description of Artificial Sequence: Synthetic peptide
NITRFQTLLALHRSYLTPGDSSSGW

SEQ ID NO: 16225 - protein, 25 aa, Artificial Sequence
  Description of Artificial Sequence: Synthetic peptide
KLNVGDYFVLTSHTVMPLSAPTLVP

SEQ ID NO: 16226 - protein, 25 aa, Artificial Sequence
  Description of Artificial Sequence: Synthetic peptide
TTYKLNVGDYFVLTSHTVMPLSAPT

SEQ ID NO: 16227 - protein, 25 aa, Artificial Sequence
  Description of Artificial Sequence: Synthetic peptide
YKLNVGDYFVLTSHTVMPLSAPTLV

SEQ ID NO: 16228 - protein, 25 aa, Artificial Sequence
  Description of Artificial Sequence: Synthetic peptide
TYKLNVGDYFVLTSHTVMPLSAPTL

SEQ ID NO: 16229 - protein, 25 aa, Artificial Sequence
  Description of Artificial Sequence: Synthetic peptide
SQGLVASIKNFKSVLYYQNNVFMSE

SEQ ID NO: 16230 - protein, 25 aa, Artificial Sequence
  Description of Artificial Sequence: Synthetic peptide
ASQGLVASIKNFKSVLYYQNNVFMS

SEQ ID NO: 16231 - protein, 25 aa, Artificial Sequence
  Description of Artificial Sequence: Synthetic peptide
STYASQGLVASIKNFKSVLYYQNNV

SEQ ID NO: 16232 - protein, 25 aa, Artificial Sequence
  Description of Artificial Sequence: Synthetic peptide
YASQGLVASIKNFKSVLYYQNNVFM

SEQ ID NO: 16233 - protein, 25 aa, Artificial Sequence
  Description of Artificial Sequence: Synthetic peptide
TYASQGLVASIKNFKSVLYYQNNVF

SEQ ID NO: 16234 - protein, 25 aa, Artificial Sequence
  Description of Artificial Sequence: Synthetic peptide
WQPGVAMPNLYKMQRMLLEKCDLQN

SEQ ID NO: 16235 - protein, 25 aa, Artificial Sequence
  Description of Artificial Sequence: Synthetic peptide
AWQPGVAMPNLYKMQRMLLEKCDLQ

SEQ ID NO: 16236 - protein, 25 aa, Artificial Sequence
  Description of Artificial Sequence: Synthetic peptide
QPGVAMPNLYKMQRMLLEKCDLQNY

SEQ ID NO: 16237 - protein, 25 aa, Artificial Sequence
  Description of Artificial Sequence: Synthetic peptide
PGVAMPNLYKMQRMLLEKCDLQNYG

SEQ ID NO: 16238 - protein, 25 aa, Artificial Sequence
  Description of Artificial Sequence: Synthetic peptide
TKGTLEPEYFNSVCRLMKTIGPDMF

SEQ ID NO: 16239 - protein, 25 aa, Artificial Sequence
  Description of Artificial Sequence: Synthetic peptide
LLTKGTLEPEYFNSVCRLMKTIGPD

SEQ ID NO: 16240 - protein, 25 aa, Artificial Sequence
  Description of Artificial Sequence: Synthetic peptide
YKTPPIKDFGGFNFSQILPDPSKPS

SEQ ID NO: 16241 - protein, 25 aa, Artificial Sequence
  Description of Artificial Sequence: Synthetic peptide
KTPPIKDFGGFNFSQILPDPSKPSK

SEQ ID NO: 16242 - protein, 25 aa, Artificial Sequence
  Description of Artificial Sequence: Synthetic peptide
TVEKGIYQTSNFRVQPTESIVRFPN

SEQ ID NO: 16243 - protein, 25 aa, Artificial Sequence
  Description of Artificial Sequence: Synthetic peptide
SKCVCSVIDLLLDDFVEIIKSQDLS

SEQ ID NO: 16244 - protein, 25 aa, Artificial Sequence
  Description of Artificial Sequence: Synthetic peptide
KCVCSVIDLLLDDFVEIIKSQDLSV

SEQ ID NO: 16245 - protein, 25 aa, Artificial Sequence
  Description of Artificial Sequence: Synthetic peptide
CVCSVIDLLLDDFVEIIKSQDLSVV

SEQ ID NO: 16246 - protein, 25 aa, Artificial Sequence
  Description of Artificial Sequence: Synthetic peptide
SEDAQGMDNLACEDLKPVSEEVVEN

SEQ ID NO: 16247 - protein, 25 aa, Artificial Sequence
  Description of Artificial Sequence: Synthetic peptide
EDAQGMDNLACEDLKPVSEEVVENP

SEQ ID NO: 16248 - protein, 25 aa, Artificial Sequence
  Description of Artificial Sequence: Synthetic peptide
DAQGMDNLACEDLKPVSEEVVENPT

SEQ ID NO: 16249 - protein, 25 aa, Artificial Sequence
  Description of Artificial Sequence: Synthetic peptide
YMGTLSYEQFKKGVQIPCTCGKQAT

SEQ ID NO: 16250 - protein, 25 aa, Artificial Sequence
  Description of Artificial Sequence: Synthetic peptide
MYMGTLSYEQFKKGVQIPCTCGKQA

SEQ ID NO: 16251 - protein, 25 aa, Artificial Sequence
  Description of Artificial Sequence: Synthetic peptide
VMYMGTLSYEQFKKGVQIPCTCGKQ

SEQ ID NO: 16252 - protein, 25 aa, Artificial Sequence
  Description of Artificial Sequence: Synthetic peptide
MGTLSYEQFKKGVQIPCTCGKQATK

SEQ ID NO: 16253 - protein, 25 aa, Artificial Sequence
  Description of Artificial Sequence: Synthetic peptide
VQLTSQWLTNIFGTVYEKLKPVLDW

SEQ ID NO: 16254 - protein, 25 aa, Artificial Sequence
  Description of Artificial Sequence: Synthetic peptide
QLTSQWLTNIFGTVYEKLKPVLDWL

SEQ ID NO: 16255 - protein, 25 aa, Artificial Sequence
  Description of Artificial Sequence: Synthetic peptide
NICYTPSKLIEYTDFATSACVLAAE

SEQ ID NO: 16256 - protein, 25 aa, Artificial Sequence
  Description of Artificial Sequence: Synthetic peptide
KKPASRELKVTFFPDLNGDVVAIDY

SEQ ID NO: 16257 - protein, 25 aa, Artificial Sequence
  Description of Artificial Sequence: Synthetic peptide
YKKPASRELKVTFFPDLNGDVVAID

SEQ ID NO: 16258 - protein, 25 aa, Artificial Sequence
  Description of Artificial Sequence: Synthetic peptide
KPASRELKVTFFPDLNGDVVAIDYK

SEQ ID NO: 16259 - protein, 25 aa, Artificial Sequence
  Description of Artificial Sequence: Synthetic peptide
SGVVTTVMFLARGIVFMCVEYCPIF

SEQ ID NO: 16260 - protein, 25 aa, Artificial Sequence
  Description of Artificial Sequence: Synthetic peptide
VLALLSDLQDLKWARFPKSDGTGTI

SEQ ID NO: 16261 - protein, 25 aa, Artificial Sequence
  Description of Artificial Sequence: Synthetic peptide
RFVLALLSDLQDLKWARFPKSDGTG

SEQ ID NO: 16262 - protein, 25 aa, Artificial Sequence
  Description of Artificial Sequence: Synthetic peptide
FVLALLSDLQDLKWARFPKSDGTGT

SEQ ID NO: 16263 - protein, 25 aa, Artificial Sequence
  Description of Artificial Sequence: Synthetic peptide
WPLIVTALRANSAVKLQNNELSPVA

SEQ ID NO: 16264 - protein, 25 aa, Artificial Sequence
  Description of Artificial Sequence: Synthetic peptide
PLIVTALRANSAVKLQNNELSPVAL

SEQ ID NO: 16265 - protein, 25 aa, Artificial Sequence
  Description of Artificial Sequence: Synthetic peptide
AWPLIVTALRANSAVKLQNNELSPV

SEQ ID NO: 16266 - protein, 25 aa, Artificial Sequence
  Description of Artificial Sequence: Synthetic peptide
CSVIDLLLDDFVEIIKSQDLSVVSK

SEQ ID NO: 16267 - protein, 25 aa, Artificial Sequence
  Description of Artificial Sequence: Synthetic peptide
TSLEIPRRNVATLQAENVTGLFKDC

SEQ ID NO: 16268 - protein, 25 aa, Artificial Sequence
  Description of Artificial Sequence: Synthetic peptide
FTSLEIPRRNVATLQAENVTGLFKD

SEQ ID NO: 16269 - protein, 25 aa, Artificial Sequence
  Description of Artificial Sequence: Synthetic peptide
QFTSLEIPRRNVATLQAENVTGLFK

SEQ ID NO: 16270 - protein, 25 aa, Artificial Sequence
  Description of Artificial Sequence: Synthetic peptide
SLEIPRRNVATLQAENVTGLFKDCS

SEQ ID NO: 16271 - protein, 25 aa, Artificial Sequence
  Description of Artificial Sequence: Synthetic peptide
GGFNFSQILPDPSKPSKRSFIEDLL

SEQ ID NO: 16272 - protein, 25 aa, Artificial Sequence
  Description of Artificial Sequence: Synthetic peptide
FLGYFCTCYFGLFCLLNRYFRLTLG

SEQ ID NO: 16273 - protein, 25 aa, Artificial Sequence
  Description of Artificial Sequence: Synthetic peptide
LGYFCTCYFGLFCLLNRYFRLTLGV

SEQ ID NO: 16274 - protein, 25 aa, Artificial Sequence
  Description of Artificial Sequence: Synthetic peptide
IKDFGGFNFSQILPDPSKPSKRSFI

SEQ ID NO: 16275 - protein, 25 aa, Artificial Sequence
  Description of Artificial Sequence: Synthetic peptide
PIKDFGGFNFSQILPDPSKPSKRSF

SEQ ID NO: 16276 - protein, 25 aa, Artificial Sequence
  Description of Artificial Sequence: Synthetic peptide
SILSPLYAFASEAARVVRSIFSRTL

SEQ ID NO: 16277 - protein, 25 aa, Artificial Sequence
  Description of Artificial Sequence: Synthetic peptide
CNSSTCMMCYKRNRATRVECTTIVN

SEQ ID NO: 16278 - protein, 25 aa, Artificial Sequence
  Description of Artificial Sequence: Synthetic peptide
YNYKLPDDFTGCVIAWNSNNLDSKV

SEQ ID NO: 16279 - protein, 25 aa, Artificial Sequence
  Description of Artificial Sequence: Synthetic peptide
SPLYAFASEAARVVRSIFSRTLETA

SEQ ID NO: 16280 - protein, 25 aa, Artificial Sequence
  Description of Artificial Sequence: Synthetic peptide
FAVHFISNSWLMWLIINLVQMAPIS

SEQ ID NO: 16281 - protein, 25 aa, Artificial Sequence
  Description of Artificial Sequence: Synthetic peptide
YYTSNPTTFHLDGEVITFDNLKTLL

SEQ ID NO: 16282 - protein, 25 aa, Artificial Sequence
  Description of Artificial Sequence: Synthetic peptide
VYYTSNPTTFHLDGEVITFDNLKTL

SEQ ID NO: 16283 - protein, 25 aa, Artificial Sequence
  Description of Artificial Sequence: Synthetic peptide
LPKEITVATSRTLSYYKLGASQRVA

SEQ ID NO: 16284 - protein, 25 aa, Artificial Sequence
  Description of Artificial Sequence: Synthetic peptide
DGCNSSTCMMCYKRNRATRVECTTI

SEQ ID NO: 16285 - protein, 25 aa, Artificial Sequence
  Description of Artificial Sequence: Synthetic peptide
VDGCNSSTCMMCYKRNRATRVECTT

SEQ ID NO: 16286 - protein, 25 aa, Artificial Sequence
  Description of Artificial Sequence: Synthetic peptide
LLLDDFVEIIKSQDLSVVSKVVKVT

SEQ ID NO: 16287 - protein, 25 aa, Artificial Sequence
  Description of Artificial Sequence: Synthetic peptide
LLDDFVEIIKSQDLSVVSKVVKVTI

SEQ ID NO: 16288 - protein, 25 aa, Artificial Sequence
  Description of Artificial Sequence: Synthetic peptide
DLLLDDFVEIIKSQDLSVVSKVVKV

SEQ ID NO: 16289 - protein, 25 aa, Artificial Sequence
  Description of Artificial Sequence: Synthetic peptide
KNNLPFKLTCATTRQVVNVVTTKIA

SEQ ID NO: 16290 - protein, 25 aa, Artificial Sequence
  Description of Artificial Sequence: Synthetic peptide
NNLPFKLTCATTRQVVNVVTTKIAL

SEQ ID NO: 16291 - protein, 25 aa, Artificial Sequence
  Description of Artificial Sequence: Synthetic peptide
NSTVLSFCAFAVDAAKAYKDYLASG

SEQ ID NO: 16292 - protein, 25 aa, Artificial Sequence
  Description of Artificial Sequence: Synthetic peptide
LYAFASEAARVVRSIFSRTLETAQN

SEQ ID NO: 16293 - protein, 25 aa, Artificial Sequence
  Description of Artificial Sequence: Synthetic peptide
KPPPGDQFKHLIPLMYKGLPWNVVR

SEQ ID NO: 16294 - protein, 25 aa, Artificial Sequence
  Description of Artificial Sequence: Synthetic peptide
ALYYPSARIVYTACSHAAVDALCEK

SEQ ID NO: 16295 - protein, 25 aa, Artificial Sequence
  Description of Artificial Sequence: Synthetic peptide
YYPSARIVYTACSHAAVDALCEKAL

SEQ ID NO: 16296 - protein, 25 aa, Artificial Sequence
  Description of Artificial Sequence: Synthetic peptide
LALYYPSARIVYTACSHAAVDALCE

SEQ ID NO: 16297 - protein, 25 aa, Artificial Sequence
  Description of Artificial Sequence: Synthetic peptide
LYYPSARIVYTACSHAAVDALCEKA

SEQ ID NO: 16298 - protein, 25 aa, Artificial Sequence
  Description of Artificial Sequence: Synthetic peptide
FNGECPNFVFPLNSIIKTIQPRVEK

SEQ ID NO: 16299 - protein, 25 aa, Artificial Sequence
  Description of Artificial Sequence: Synthetic peptide
TNNAMQVESDDYIATNGPLKVGGSC

SEQ ID NO: 16300 - protein, 25 aa, Artificial Sequence
  Description of Artificial Sequence: Synthetic peptide
VLGSLAATVRLQAGNATEVPANSTV

SEQ ID NO: 16301 - protein, 25 aa, Artificial Sequence
  Description of Artificial Sequence: Synthetic peptide
MVLGSLAATVRLQAGNATEVPANST

SEQ ID NO: 16302 - protein, 25 aa, Artificial Sequence
  Description of Artificial Sequence: Synthetic peptide
RSAAKKNNLPFKLTCATTRQVVNVV

SEQ ID NO: 16303 - protein, 25 aa, Artificial Sequence
  Description of Artificial Sequence: Synthetic peptide
IRSAAKKNNLPFKLTCATTRQVVNV

SEQ ID NO: 16304 - protein, 25 aa, Artificial Sequence
  Description of Artificial Sequence: Synthetic peptide
EQKSILSPLYAFASEAARVVRSIFS

SEQ ID NO: 16305 - protein, 25 aa, Artificial Sequence
  Description of Artificial Sequence: Synthetic peptide
NIGEQKSILSPLYAFASEAARVVRS

SEQ ID NO: 16306 - protein, 25 aa, Artificial Sequence
  Description of Artificial Sequence: Synthetic peptide
IGEQKSILSPLYAFASEAARVVRSI

SEQ ID NO: 16307 - protein, 25 aa, Artificial Sequence
  Description of Artificial Sequence: Synthetic peptide
GEQKSILSPLYAFASEAARVVRSIF

SEQ ID NO: 16308 - protein, 25 aa, Artificial Sequence
  Description of Artificial Sequence: Synthetic peptide
NLKTLLSLREVRTIKVFTTVDNINL

SEQ ID NO: 16309 - protein, 25 aa, Artificial Sequence
  Description of Artificial Sequence: Synthetic peptide
LKTLLSLREVRTIKVFTTVDNINLH

SEQ ID NO: 16310 - protein, 25 aa, Artificial Sequence
  Description of Artificial Sequence: Synthetic peptide
REVGFVVPGLPGTILRTTNGDFLHF

SEQ ID NO: 16311 - protein, 25 aa, Artificial Sequence
  Description of Artificial Sequence: Synthetic peptide
TREVGFVVPGLPGTILRTTNGDFLH

SEQ ID NO: 16312 - protein, 25 aa, Artificial Sequence
  Description of Artificial Sequence: Synthetic peptide
EVRTIKVFTTVDNINLHTQVVDMSM

SEQ ID NO: 16313 - protein, 25 aa, Artificial Sequence
  Description of Artificial Sequence: Synthetic peptide
PYFFTLLLQLCTFTRSTNSRIKASM

SEQ ID NO: 16314 - protein, 25 aa, Artificial Sequence
  Description of Artificial Sequence: Synthetic peptide
YFFTLLLQLCTFTRSTNSRIKASMP

SEQ ID NO: 16315 - protein, 25 aa, Artificial Sequence
  Description of Artificial Sequence: Synthetic peptide
QLCTFTRSTNSRIKASMPTTIAKNT

SEQ ID NO: 16316 - protein, 25 aa, Artificial Sequence
  Description of Artificial Sequence: Synthetic peptide
LQLCTFTRSTNSRIKASMPTTIAKN

SEQ ID NO: 16317 - protein, 25 aa, Artificial Sequence
  Description of Artificial Sequence: Synthetic peptide
LLQLCTFTRSTNSRIKASMPTTIAK

SEQ ID NO: 16318 - protein, 25 aa, Artificial Sequence
  Description of Artificial Sequence: Synthetic peptide
RVSAKPPPGDQFKHLIPLMYKGLPW

SEQ ID NO: 16319 - protein, 25 aa, Artificial Sequence
  Description of Artificial Sequence: Synthetic peptide
AKPPPGDQFKHLIPLMYKGLPWNVV

SEQ ID NO: 16320 - protein, 25 aa, Artificial Sequence
  Description of Artificial Sequence: Synthetic peptide
VSAKPPPGDQFKHLIPLMYKGLPWN

SEQ ID NO: 16321 - protein, 25 aa, Artificial Sequence
  Description of Artificial Sequence: Synthetic peptide
SAKPPPGDQFKHLIPLMYKGLPWNV

SEQ ID NO: 16322 - protein, 25 aa, Artificial Sequence
  Description of Artificial Sequence: Synthetic peptide
KLVNKFLALCADSIIIGGAKLKALN

SEQ ID NO: 16323 - protein, 25 aa, Artificial Sequence
  Description of Artificial Sequence: Synthetic peptide
LGTEVNEFACVVADAVIKTLQPVSE

SEQ ID NO: 16324 - protein, 25 aa, Artificial Sequence
  Description of Artificial Sequence: Synthetic peptide
ELGTEVNEFACVVADAVIKTLQPVS

SEQ ID NO: 16325 - protein, 25 aa, Artificial Sequence
  Description of Artificial Sequence: Synthetic peptide
TVELGTEVNEFACVVADAVIKTLQP

SEQ ID NO: 16326 - protein, 25 aa, Artificial Sequence
  Description of Artificial Sequence: Synthetic peptide
VELGTEVNEFACVVADAVIKTLQPV

SEQ ID NO: 16327 - protein, 25 aa, Artificial Sequence
  Description of Artificial Sequence: Synthetic peptide
TLLLQLCTFTRSTNSRIKASMPTTI

SEQ ID NO: 16328 - protein, 25 aa, Artificial Sequence
  Description of Artificial Sequence: Synthetic peptide
MPNMLRIMASLVLARKHTTCCSLSH

SEQ ID NO: 16329 - protein, 25 aa, Artificial Sequence
  Description of Artificial Sequence: Synthetic peptide
GLNGYTVEEAKTVLKKCKSAFYILP

SEQ ID NO: 16330 - protein, 25 aa, Artificial Sequence
  Description of Artificial Sequence: Synthetic peptide
VPYCYDTNVLEGSVAYESLRPDTRY

SEQ ID NO: 16331 - protein, 25 aa, Artificial Sequence
  Description of Artificial Sequence: Synthetic peptide
NYITTYPGQGLNGYTVEEAKTVLKK

SEQ ID NO: 16332 - protein, 25 aa, Artificial Sequence
  Description of Artificial Sequence: Synthetic peptide
FYVYANGGKGFCKLHNWNCVNCDTF

SEQ ID NO: 16333 - protein, 25 aa, Artificial Sequence
  Description of Artificial Sequence: Synthetic peptide
YANGGKGFCKLHNWNCVNCDTFCAG

SEQ ID NO: 16334 - protein, 25 aa, Artificial Sequence
  Description of Artificial Sequence: Synthetic peptide
ANGGKGFCKLHNWNCVNCDTFCAGS

SEQ ID NO: 16335 - protein, 25 aa, Artificial Sequence
  Description of Artificial Sequence: Synthetic peptide
VYANGGKGFCKLHNWNCVNCDTFCA

SEQ ID NO: 16336 - protein, 25 aa, Artificial Sequence
  Description of Artificial Sequence: Synthetic peptide
YVYANGGKGFCKLHNWNCVNCDTFC

SEQ ID NO: 16337 - protein, 25 aa, Artificial Sequence
  Description of Artificial Sequence: Synthetic peptide
DTANPKTPKYKFVRIQPGQTFSVLA

SEQ ID NO: 16338 - protein, 25 aa, Artificial Sequence
  Description of Artificial Sequence: Synthetic peptide
TANPKTPKYKFVRIQPGQTFSVLAC

SEQ ID NO: 16339 - protein, 25 aa, Artificial Sequence
  Description of Artificial Sequence: Synthetic peptide
ANPKTPKYKFVRIQPGQTFSVLACY

SEQ ID NO: 16340 - protein, 25 aa, Artificial Sequence
  Description of Artificial Sequence: Synthetic peptide
NPKTPKYKFVRIQPGQTFSVLACYN

SEQ ID NO: 16341 - protein, 25 aa, Artificial Sequence
  Description of Artificial Sequence: Synthetic peptide
YYHTTDPSFLGRYMSALNHTKKWKY

SEQ ID NO: 16342 - protein, 25 aa, Artificial Sequence
  Description of Artificial Sequence: Synthetic peptide
YHTTDPSFLGRYMSALNHTKKWKYP

SEQ ID NO: 16343 - protein, 25 aa, Artificial Sequence
  Description of Artificial Sequence: Synthetic peptide
LAKALRKVPTDNYITTYPGQGLNGY

SEQ ID NO: 16344 - protein, 25 aa, Artificial Sequence
  Description of Artificial Sequence: Synthetic peptide
MLAKALRKVPTDNYITTYPGQGLNG

SEQ ID NO: 16345 - protein, 25 aa, Artificial Sequence
  Description of Artificial Sequence: Synthetic peptide
NFVFPLNSIIKTIQPRVEKKKLDGF

SEQ ID NO: 16346 - protein, 25 aa, Artificial Sequence
  Description of Artificial Sequence: Synthetic peptide
VFPLNSIIKTIQPRVEKKKLDGFMG

SEQ ID NO: 16347 - protein, 25 aa, Artificial Sequence
  Description of Artificial Sequence: Synthetic peptide
PNFVFPLNSIIKTIQPRVEKKKLDG

SEQ ID NO: 16348 - protein, 25 aa, Artificial Sequence
  Description of Artificial Sequence: Synthetic peptide
FVFPLNSIIKTIQPRVEKKKLDGFM

SEQ ID NO: 16349 - protein, 25 aa, Artificial Sequence
  Description of Artificial Sequence: Synthetic peptide
FPLNSIIKTIQPRVEKKKLDGFMGR

SEQ ID NO: 16350 - protein, 25 aa, Artificial Sequence
  Description of Artificial Sequence: Synthetic peptide
YCYDTNVLEGSVAYESLRPDTRYVL

SEQ ID NO: 16351 - protein, 25 aa, Artificial Sequence
  Description of Artificial Sequence: Synthetic peptide
CYDTNVLEGSVAYESLRPDTRYVLM

SEQ ID NO: 16352 - protein, 25 aa, Artificial Sequence
  Description of Artificial Sequence: Synthetic peptide
VKDFMSLSEQLRKQIRSAAKKNNLP

SEQ ID NO: 16353 - protein, 25 aa, Artificial Sequence
  Description of Artificial Sequence: Synthetic peptide
DNLACEDLKPVSEEVVENPTIQKDV

SEQ ID NO: 16354 - protein, 25 aa, Artificial Sequence
  Description of Artificial Sequence: Synthetic peptide
MDNLACEDLKPVSEEVVENPTIQKD

SEQ ID NO: 16355 - protein, 25 aa, Artificial Sequence
  Description of Artificial Sequence: Synthetic peptide
DTNVLEGSVAYESLRPDTRYVLMDG

SEQ ID NO: 16356 - protein, 25 aa, Artificial Sequence
  Description of Artificial Sequence: Synthetic peptide
ASKIITLKKRWQLALSKGVHFVCNL

SEQ ID NO: 16357 - protein, 25 aa, Artificial Sequence
  Description of Artificial Sequence: Synthetic peptide
SDVLLPLTQYNRYLALYNKYKYFSG

SEQ ID NO: 16358 - protein, 25 aa, Artificial Sequence
  Description of Artificial Sequence: Synthetic peptide
VLEGSVAYESLRPDTRYVLMDGSII

SEQ ID NO: 16359 - protein, 25 aa, Artificial Sequence
  Description of Artificial Sequence: Synthetic peptide
LEGSVAYESLRPDTRYVLMDGSIIQ

SEQ ID NO: 16360 - protein, 25 aa, Artificial Sequence
  Description of Artificial Sequence: Synthetic peptide
EDLLIRKSNHNFLVQAGNVQLRVIG

SEQ ID NO: 16361 - protein, 25 aa, Artificial Sequence
  Description of Artificial Sequence: Synthetic peptide
NYEDLLIRKSNHNFLVQAGNVQLRV

SEQ ID NO: 16362 - protein, 25 aa, Artificial Sequence
  Description of Artificial Sequence: Synthetic peptide
YEDLLIRKSNHNFLVQAGNVQLRVI

SEQ ID NO: 16363 - protein, 25 aa, Artificial Sequence
  Description of Artificial Sequence: Synthetic peptide
IPGIPKDMTYRRLISMMGFKMNYQV

SEQ ID NO: 16364 - protein, 25 aa, Artificial Sequence
  Description of Artificial Sequence: Synthetic peptide
VDIPGIPKDMTYRRLISMMGFKMNY

SEQ ID NO: 16365 - protein, 25 aa, Artificial Sequence
  Description of Artificial Sequence: Synthetic peptide
DIPGIPKDMTYRRLISMMGFKMNYQ

SEQ ID NO: 16366 - protein, 25 aa, Artificial Sequence
  Description of Artificial Sequence: Synthetic peptide
ADDLNQLTGYKKPASRELKVTFFPD

SEQ ID NO: 16367 - protein, 25 aa, Artificial Sequence
  Description of Artificial Sequence: Synthetic peptide
AFEYYHTTDPSFLGRYMSALNHTKK

SEQ ID NO: 16368 - protein, 25 aa, Artificial Sequence
  Description of Artificial Sequence: Synthetic peptide
APNMMVTNNTFTLKGGAPTKVTFGD

SEQ ID NO: 16369 - protein, 25 aa, Artificial Sequence
  Description of Artificial Sequence: Synthetic peptide
PNLAWPLIVTALRANSAVKLQNNEL

SEQ ID NO: 16370 - protein, 25 aa, Artificial Sequence
  Description of Artificial Sequence: Synthetic peptide
SPNLAWPLIVTALRANSAVKLQNNE

SEQ ID NO: 16371 - protein, 25 aa, Artificial Sequence
  Description of Artificial Sequence: Synthetic peptide
NLAWPLIVTALRANSAVKLQNNELS

SEQ ID NO: 16372 - protein, 25 aa, Artificial Sequence
  Description of Artificial Sequence: Synthetic peptide
EAFEYYHTTDPSFLGRYMSALNHTK

SEQ ID NO: 16373 - protein, 25 aa, Artificial Sequence
  Description of Artificial Sequence: Synthetic peptide
TTEVVGDIILKPANNSLKITEEVGH

SEQ ID NO: 16374 - protein, 25 aa, Artificial Sequence
  Description of Artificial Sequence: Synthetic peptide
EVVGDIILKPANNSLKITEEVGHTD

SEQ ID NO: 16375 - protein, 25 aa, Artificial Sequence
  Description of Artificial Sequence: Synthetic peptide
VVGDIILKPANNSLKITEEVGHTDL

SEQ ID NO: 16376 - protein, 25 aa, Artificial Sequence
  Description of Artificial Sequence: Synthetic peptide
TEVVGDIILKPANNSLKITEEVGHT

SEQ ID NO: 16377 - protein, 25 aa, Artificial Sequence
  Description of Artificial Sequence: Synthetic peptide
KEGVEFLRDGWEIVKFISTCACEIV

SEQ ID NO: 16378 - protein, 25 aa, Artificial Sequence
  Description of Artificial Sequence: Synthetic peptide
WAKRNIKPVPEVKILNNLGVDIAAN

SEQ ID NO: 16379 - protein, 25 aa, Artificial Sequence
  Description of Artificial Sequence: Synthetic peptide
MDNSPNLAWPLIVTALRANSAVKLQ

SEQ ID NO: 16380 - protein, 25 aa, Artificial Sequence
  Description of Artificial Sequence: Synthetic peptide
KTPKYKFVRIQPGQTFSVLACYNGS

SEQ ID NO: 16381 - protein, 25 aa, Artificial Sequence
  Description of Artificial Sequence: Synthetic peptide
PKTPKYKFVRIQPGQTFSVLACYNG

SEQ ID NO: 16382 - protein, 25 aa, Artificial Sequence
  Description of Artificial Sequence: Synthetic peptide
TSGRWVLNNDYYRSLPGVFCGVDAV

SEQ ID NO: 16383 - protein, 25 aa, Artificial Sequence
  Description of Artificial Sequence: Synthetic peptide
SGRWVLNNDYYRSLPGVFCGVDAVN

SEQ ID NO: 16384 - protein, 25 aa, Artificial Sequence
  Description of Artificial Sequence: Synthetic peptide
TSNSFDVLKSEDAQGMDNLACEDLK

SEQ ID NO: 16385 - protein, 25 aa, Artificial Sequence
  Description of Artificial Sequence: Synthetic peptide
GLNNLNRGMVLGSLAATVRLQAGNA

SEQ ID NO: 16386 - protein, 25 aa, Artificial Sequence
  Description of Artificial Sequence: Synthetic peptide
VRQCSGVTFQSAVKRTIKGTHHWLL

SEQ ID NO: 16387 - protein, 25 aa, Artificial Sequence
  Description of Artificial Sequence: Synthetic peptide
PLTQYNRYLALYNKYKYFSGAMDTT

SEQ ID NO: 16388 - protein, 25 aa, Artificial Sequence
  Description of Artificial Sequence: Synthetic peptide
KLNEEIAIILASFSASTSAFVETVK

SEQ ID NO: 16389 - protein, 25 aa, Artificial Sequence
  Description of Artificial Sequence: Synthetic peptide
ADQAMTQMYKQARSEDKRAKVTSAM

SEQ ID NO: 16390 - protein, 25 aa, Artificial Sequence
  Description of Artificial Sequence: Synthetic peptide
MADQAMTQMYKQARSEDKRAKVTSA

SEQ ID NO: 16391 - protein, 25 aa, Artificial Sequence
  Description of Artificial Sequence: Synthetic peptide
KMADQAMTQMYKQARSEDKRAKVTS

SEQ ID NO: 16392 - protein, 25 aa, Artificial Sequence
  Description of Artificial Sequence: Synthetic peptide
LWSTKPVETSNSFDVLKSEDAQGMD

SEQ ID NO: 16393 - protein, 25 aa, Artificial Sequence
  Description of Artificial Sequence: Synthetic peptide
CVPLNIIPLTTAAKLMVVIPDYNTY

SEQ ID NO: 16394 - protein, 25 aa, Artificial Sequence
  Description of Artificial Sequence: Synthetic peptide
AVANGDSEVVLKKLKKSLNVAKSEF

SEQ ID NO: 16395 - protein, 25 aa, Artificial Sequence
  Description of Artificial Sequence: Synthetic peptide
VANGDSEVVLKKLKKSLNVAKSEFD

SEQ ID NO: 16396 - protein, 25 aa, Artificial Sequence
  Description of Artificial Sequence: Synthetic peptide
LNNDYYRSLPGVFCGVDAVNLLTNM

SEQ ID NO: 16397 - protein, 25 aa, Artificial Sequence
  Description of Artificial Sequence: Synthetic peptide
KIALKGGKIVNNWLKQLIKVTLVFL

SEQ ID NO: 16398 - protein, 25 aa, Artificial Sequence
  Description of Artificial Sequence: Synthetic peptide
TKIALKGGKIVNNWLKQLIKVTLVF

SEQ ID NO: 16399 - protein, 25 aa, Artificial Sequence
  Description of Artificial Sequence: Synthetic peptide
IALKGGKIVNNWLKQLIKVTLVFLF

SEQ ID NO: 16400 - protein, 25 aa, Artificial Sequence
  Description of Artificial Sequence: Synthetic peptide
TTKIALKGGKIVNNWLKQLIKVTLV

SEQ ID NO: 16401 - protein, 25 aa, Artificial Sequence
  Description of Artificial Sequence: Synthetic peptide
PCSVCLSGLDSLDTYPSLETIQITI

SEQ ID NO: 16402 - protein, 25 aa, Artificial Sequence
  Description of Artificial Sequence: Synthetic peptide
IPCSVCLSGLDSLDTYPSLETIQIT

SEQ ID NO: 16403 - protein, 25 aa, Artificial Sequence
  Description of Artificial Sequence: Synthetic peptide
CSVCLSGLDSLDTYPSLETIQITIS

SEQ ID NO: 16404 - protein, 25 aa, Artificial Sequence
  Description of Artificial Sequence: Synthetic peptide
SVCLSGLDSLDTYPSLETIQITISS

SEQ ID NO: 16405 - protein, 25 aa, Artificial Sequence
  Description of Artificial Sequence: Synthetic peptide
SIPCSVCLSGLDSLDTYPSLETIQI

SEQ ID NO: 16406 - protein, 25 aa, Artificial Sequence
  Description of Artificial Sequence: Synthetic peptide
GSIPCSVCLSGLDSLDTYPSLETIQ

SEQ ID NO: 16407 - protein, 25 aa, Artificial Sequence
  Description of Artificial Sequence: Synthetic peptide
VCLSGLDSLDTYPSLETIQITISSF

SEQ ID NO: 16408 - protein, 25 aa, Artificial Sequence
  Description of Artificial Sequence: Synthetic peptide
WVLNNDYYRSLPGVFCGVDAVNLLT

SEQ ID NO: 16409 - protein, 25 aa, Artificial Sequence
  Description of Artificial Sequence: Synthetic peptide
KLWAQCVQLHNDILLAKDTTEAFEK

SEQ ID NO: 16410 - protein, 25 aa, Artificial Sequence
  Description of Artificial Sequence: Synthetic peptide
LWAQCVQLHNDILLAKDTTEAFEKM

SEQ ID NO: 16411 - protein, 25 aa, Artificial Sequence
  Description of Artificial Sequence: Synthetic peptide
AQCVQLHNDILLAKDTTEAFEKMVS

SEQ ID NO: 16412 - protein, 25 aa, Artificial Sequence
  Description of Artificial Sequence: Synthetic peptide
WAQCVQLHNDILLAKDTTEAFEKMV

SEQ ID NO: 16413 - protein, 25 aa, Artificial Sequence
  Description of Artificial Sequence: Synthetic peptide
TVSVSSPDAVTAYNGYLTSSSKTPE

SEQ ID NO: 16414 - protein, 25 aa, Artificial Sequence
  Description of Artificial Sequence: Synthetic peptide
ALIISVTSNYSGVVTTVMFLARGIV

SEQ ID NO: 16415 - protein, 25 aa, Artificial Sequence
  Description of Artificial Sequence: Synthetic peptide
ILMTARTVYDDGARRVWTLMNVLTL

SEQ ID NO: 16416 - protein, 25 aa, Artificial Sequence
  Description of Artificial Sequence: Synthetic peptide
LKKSLNVAKSEFDRDAAMQRKLEKM

SEQ ID NO: 16417 - protein, 25 aa, Artificial Sequence
  Description of Artificial Sequence: Synthetic peptide
NFKFVCDNIKFADDLNQLTGYKKPA

SEQ ID NO: 16418 - protein, 25 aa, Artificial Sequence
  Description of Artificial Sequence: Synthetic peptide
FKFVCDNIKFADDLNQLTGYKKPAS

SEQ ID NO: 16419 - protein, 25 aa, Artificial Sequence
  Description of Artificial Sequence: Synthetic peptide
EQAVANGDSEVVLKKLKKSLNVAKS

SEQ ID NO: 16420 - protein, 25 aa, Artificial Sequence
  Description of Artificial Sequence: Synthetic peptide
VTLVFLFVAAIFYLITPVHVMSKHT

SEQ ID NO: 16421 - protein, 25 aa, Artificial Sequence
  Description of Artificial Sequence: Synthetic peptide
TLVFLFVAAIFYLITPVHVMSKHTD

SEQ ID NO: 16422 - protein, 25 aa, Artificial Sequence
  Description of Artificial Sequence: Synthetic peptide
QIVTCAKEIKESVQTFFKLVNKFLA

SEQ ID NO: 16423 - protein, 25 aa, Artificial Sequence
  Description of Artificial Sequence: Synthetic peptide
IVTCAKEIKESVQTFFKLVNKFLAL

SEQ ID NO: 16424 - protein, 25 aa, Artificial Sequence
  Description of Artificial Sequence: Synthetic peptide
TGDSCNNYMLTYNKVENMTPRDLGA

SEQ ID NO: 16425 - protein, 25 aa, Artificial Sequence
  Description of Artificial Sequence: Synthetic peptide
VTGDSCNNYMLTYNKVENMTPRDLG

SEQ ID NO: 16426 - protein, 25 aa, Artificial Sequence
  Description of Artificial Sequence: Synthetic peptide
EVTGDSCNNYMLTYNKVENMTPRDL

SEQ ID NO: 16427 - protein, 25 aa, Artificial Sequence
  Description of Artificial Sequence: Synthetic peptide
IEVTGDSCNNYMLTYNKVENMTPRD

SEQ ID NO: 16428 - protein, 25 aa, Artificial Sequence
  Description of Artificial Sequence: Synthetic peptide
GSVGFNIDYDCVSFCYMHHMELPTG

SEQ ID NO: 16429 - protein, 25 aa, Artificial Sequence
  Description of Artificial Sequence: Synthetic peptide
KYCALAPNMMVTNNTFTLKGGAPTK

SEQ ID NO: 16430 - protein, 25 aa, Artificial Sequence
  Description of Artificial Sequence: Synthetic peptide
EKYCALAPNMMVTNNTFTLKGGAPT

SEQ ID NO: 16431 - protein, 25 aa, Artificial Sequence
  Description of Artificial Sequence: Synthetic peptide
TEKYCALAPNMMVTNNTFTLKGGAP

SEQ ID NO: 16432 - protein, 25 aa, Artificial Sequence
  Description of Artificial Sequence: Synthetic peptide
YCALAPNMMVTNNTFTLKGGAPTKV

SEQ ID NO: 16433 - protein, 25 aa, Artificial Sequence
  Description of Artificial Sequence: Synthetic peptide
QRKLEKMADQAMTQMYKQARSEDKR

SEQ ID NO: 16434 - protein, 25 aa, Artificial Sequence
  Description of Artificial Sequence: Synthetic peptide
MQRKLEKMADQAMTQMYKQARSEDK

SEQ ID NO: 16435 - protein, 25 aa, Artificial Sequence
  Description of Artificial Sequence: Synthetic peptide
GQIVTCAKEIKESVQTFFKLVNKFL

SEQ ID NO: 16436 - protein, 25 aa, Artificial Sequence
  Description of Artificial Sequence: Synthetic peptide
NPKGFCDLKGKYVQIPTTCANDPVG

SEQ ID NO: 16437 - protein, 25 aa, Artificial Sequence
  Description of Artificial Sequence: Synthetic peptide
DGSIIQFPNTYLEGSVRVVTTFDSE

SEQ ID NO: 16438 - protein, 25 aa, Artificial Sequence
  Description of Artificial Sequence: Synthetic peptide
QPQLEMELTPVVQTIEVNSFSGYLK

SEQ ID NO: 16439 - protein, 25 aa, Artificial Sequence
  Description of Artificial Sequence: Synthetic peptide
QLEMELTPVVQTIEVNSFSGYLKLT

SEQ ID NO: 16440 - protein, 25 aa, Artificial Sequence
  Description of Artificial Sequence: Synthetic peptide
LEMELTPVVQTIEVNSFSGYLKLTD

SEQ ID NO: 16441 - protein, 25 aa, Artificial Sequence
  Description of Artificial Sequence: Synthetic peptide
PQLEMELTPVVQTIEVNSFSGYLKL

SEQ ID NO: 16442 - protein, 25 aa, Artificial Sequence
  Description of Artificial Sequence: Synthetic peptide
DGARRVWTLMNVLTLVYKVYYGNAL

SEQ ID NO: 16443 - protein, 25 aa, Artificial Sequence
  Description of Artificial Sequence: Synthetic peptide
GPEHSLAEYHNESGLKTILRKGGRT

SEQ ID NO: 16444 - protein, 25 aa, Artificial Sequence
  Description of Artificial Sequence: Synthetic peptide
SLAEYHNESGLKTILRKGGRTIAFG

SEQ ID NO: 16445 - protein, 25 aa, Artificial Sequence
  Description of Artificial Sequence: Synthetic peptide
PEHSLAEYHNESGLKTILRKGGRTI

SEQ ID NO: 16446 - protein, 25 aa, Artificial Sequence
  Description of Artificial Sequence: Synthetic peptide
EHSLAEYHNESGLKTILRKGGRTIA

SEQ ID NO: 16447 - protein, 25 aa, Artificial Sequence
  Description of Artificial Sequence: Synthetic peptide
HSLAEYHNESGLKTILRKGGRTIAF

SEQ ID NO: 16448 - protein, 25 aa, Artificial Sequence
  Description of Artificial Sequence: Synthetic peptide
RSDVLLPLTQYNRYLALYNKYKYFS

SEQ ID NO: 16449 - protein, 25 aa, Artificial Sequence
  Description of Artificial Sequence: Synthetic peptide
ASFYYVWKSYVHVVDGCNSSTCMMC

SEQ ID NO: 16450 - protein, 25 aa, Artificial Sequence
  Description of Artificial Sequence: Synthetic peptide
RSIFSRTLETAQNSVRVLQKAAITI

SEQ ID NO: 16451 - protein, 25 aa, Artificial Sequence
  Description of Artificial Sequence: Synthetic peptide
SIFSRTLETAQNSVRVLQKAAITIL

SEQ ID NO: 16452 - protein, 25 aa, Artificial Sequence
  Description of Artificial Sequence: Synthetic peptide
SIIQFPNTYLEGSVRVVTTFDSEYC

SEQ ID NO: 16453 - protein, 25 aa, Artificial Sequence
  Description of Artificial Sequence: Synthetic peptide
DSCKRVLNVVCKTCGQQQTTLKGVE

SEQ ID NO: 16454 - protein, 25 aa, Artificial Sequence
  Description of Artificial Sequence: Synthetic peptide
TEAFEKMVSLLSVLLSMQGAVDINK

SEQ ID NO: 16455 - protein, 25 aa, Artificial Sequence
  Description of Artificial Sequence: Synthetic peptide
PSIISNEKQEILGTVSWNLREMLAH

SEQ ID NO: 16456 - protein, 25 aa, Artificial Sequence
  Description of Artificial Sequence: Synthetic peptide
ETVKGLDYKAFKQIVESCGNFKVTK

SEQ ID NO: 16457 - protein, 25 aa, Artificial Sequence
  Description of Artificial Sequence: Synthetic peptide
TVKGLDYKAFKQIVESCGNFKVTKG

SEQ ID NO: 16458 - protein, 25 aa, Artificial Sequence
  Description of Artificial Sequence: Synthetic peptide
QHLKDGTCGLVEVEKGVLPQLEQPY

SEQ ID NO: 16459 - protein, 25 aa, Artificial Sequence
  Description of Artificial Sequence: Synthetic peptide
LKDGTCGLVEVEKGVLPQLEQPYVF

SEQ ID NO: 16460 - protein, 25 aa, Artificial Sequence
  Description of Artificial Sequence: Synthetic peptide
HLKDGTCGLVEVEKGVLPQLEQPYV

SEQ ID NO: 16461 - protein, 25 aa, Artificial Sequence
  Description of Artificial Sequence: Synthetic peptide
TVYEKLKPVLDWLEEKFKEGVEFLR

SEQ ID NO: 16462 - protein, 25 aa, Artificial Sequence
  Description of Artificial Sequence: Synthetic peptide
IANYAKPFLNKVVSTTTNIVTRCLN

SEQ ID NO: 16463 - protein, 25 aa, Artificial Sequence
  Description of Artificial Sequence: Synthetic peptide
KPFLNKVVSTTTNIVTRCLNRVCTN

SEQ ID NO: 16464 - protein, 25 aa, Artificial Sequence
  Description of Artificial Sequence: Synthetic peptide
GTVYEKLKPVLDWLEEKFKEGVEFL

SEQ ID NO: 16465 - protein, 25 aa, Artificial Sequence
  Description of Artificial Sequence: Synthetic peptide
NRATLQAIASEFSSLPSYAAFATAQ

SEQ ID NO: 16466 - protein, 25 aa, Artificial Sequence
  Description of Artificial Sequence: Synthetic peptide
AKLKALNLGETFVTHSKGLYRKCVK

SEQ ID NO: 16467 - protein, 25 aa, Artificial Sequence
  Description of Artificial Sequence: Synthetic peptide
TIKGTHHWLLLTILTSLLVLVQSTQ

SEQ ID NO: 16468 - protein, 25 aa, Artificial Sequence
  Description of Artificial Sequence: Synthetic peptide
IKGTHHWLLLTILTSLLVLVQSTQW

SEQ ID NO: 16469 - protein, 25 aa, Artificial Sequence
  Description of Artificial Sequence: Synthetic peptide
RTIKGTHHWLLLTILTSLLVLVQST

SEQ ID NO: 16470 - protein, 25 aa, Artificial Sequence
  Description of Artificial Sequence: Synthetic peptide
STTTNIVTRCLNRVCTNYMPYFFTL

SEQ ID NO: 16471 - protein, 25 aa, Artificial Sequence
  Description of Artificial Sequence: Synthetic peptide
YLAVFDKNLYDKLVSSFLEMKSEKQ

SEQ ID NO: 16472 - protein, 25 aa, Artificial Sequence
  Description of Artificial Sequence: Synthetic peptide
LAVFDKNLYDKLVSSFLEMKSEKQV

SEQ ID NO: 16473 - protein, 25 aa, Artificial Sequence
  Description of Artificial Sequence: Synthetic peptide
YFNMVYMPASWVMRIMTWLDMVDTS

SEQ ID NO: 16474 - protein, 25 aa, Artificial Sequence
  Description of Artificial Sequence: Synthetic peptide
NVNKGEDIQLLKSAYENFNQHEVLL

SEQ ID NO: 16475 - protein, 25 aa, Artificial Sequence
  Description of Artificial Sequence: Synthetic peptide
VNKGEDIQLLKSAYENFNQHEVLLA

SEQ ID NO: 16476 - protein, 25 aa, Artificial Sequence
  Description of Artificial Sequence: Synthetic peptide
PNVNKGEDIQLLKSAYENFNQHEVL

SEQ ID NO: 16477 - protein, 25 aa, Artificial Sequence
  Description of Artificial Sequence: Synthetic peptide
GPNVNKGEDIQLLKSAYENFNQHEV

SEQ ID NO: 16478 - protein, 25 aa, Artificial Sequence
  Description of Artificial Sequence: Synthetic peptide
GETFVTHSKGLYRKCVKSREETGLL

SEQ ID NO: 16479 - protein, 25 aa, Artificial Sequence
  Description of Artificial Sequence: Synthetic peptide
KMSDVKCTSVVLLSVLQQLRVESSS

SEQ ID NO: 16480 - protein, 25 aa, Artificial Sequence
  Description of Artificial Sequence: Synthetic peptide
WLMWLIINLVQMAPISAMVRMYIFF

SEQ ID NO: 16481 - protein, 25 aa, Artificial Sequence
  Description of Artificial Sequence: Synthetic peptide
LMWLIINLVQMAPISAMVRMYIFFA

SEQ ID NO: 16482 - protein, 25 aa, Artificial Sequence
  Description of Artificial Sequence: Synthetic peptide
AMQTMLFTMLRKLDNDALNNIINNA

SEQ ID NO: 16483 - protein, 25 aa, Artificial Sequence
  Description of Artificial Sequence: Synthetic peptide
SFLGRYMSALNHTKKWKYPQVNGLT

SEQ ID NO: 16484 - protein, 25 aa, Artificial Sequence
  Description of Artificial Sequence: Synthetic peptide
APISAMVRMYIFFASFYYVWKSYVH

SEQ ID NO: 16485 - protein, 25 aa, Artificial Sequence
  Description of Artificial Sequence: Synthetic peptide
MLCTHTGTGQAITVTPEANMDQESF

SEQ ID NO: 16486 - protein, 25 aa, Artificial Sequence
  Description of Artificial Sequence: Synthetic peptide
THTGTGQAITVTPEANMDQESFGGA

SEQ ID NO: 16487 - protein, 25 aa, Artificial Sequence
  Description of Artificial Sequence: Synthetic peptide
HTGTGQAITVTPEANMDQESFGGAS

SEQ ID NO: 16488 - protein, 25 aa, Artificial Sequence
  Description of Artificial Sequence: Synthetic peptide
LCTHTGTGQAITVTPEANMDQESFG

SEQ ID NO: 16489 - protein, 25 aa, Artificial Sequence
  Description of Artificial Sequence: Synthetic peptide
CTHTGTGQAITVTPEANMDQESFGG

SEQ ID NO: 16490 - protein, 25 aa, Artificial Sequence
  Description of Artificial Sequence: Synthetic peptide
SDVKCTSVVLLSVLQQLRVESSSKL

SEQ ID NO: 16491 - protein, 25 aa, Artificial Sequence
  Description of Artificial Sequence: Synthetic peptide
MPASWVMRIMTWLDMVDTSLSGFKL

SEQ ID NO: 16492 - protein, 25 aa, Artificial Sequence
  Description of Artificial Sequence: Synthetic peptide
EQLDFIDTKRGVYCCREHEHEIAWY

SEQ ID NO: 16493 - protein, 25 aa, Artificial Sequence
  Description of Artificial Sequence: Synthetic peptide
SEQLDFIDTKRGVYCCREHEHEIAW

SEQ ID NO: 16494 - protein, 25 aa, Artificial Sequence
  Description of Artificial Sequence: Synthetic peptide
VLKTGDLQPLEQPTSEAVEAPLVGT

SEQ ID NO: 16495 - protein, 25 aa, Artificial Sequence
  Description of Artificial Sequence: Synthetic peptide
KTGDLQPLEQPTSEAVEAPLVGTPV

SEQ ID NO: 16496 - protein, 25 aa, Artificial Sequence
  Description of Artificial Sequence: Synthetic peptide
EVVLKTGDLQPLEQPTSEAVEAPLV

SEQ ID NO: 16497 - protein, 25 aa, Artificial Sequence
  Description of Artificial Sequence: Synthetic peptide
LKTGDLQPLEQPTSEAVEAPLVGTP

SEQ ID NO: 16498 - protein, 25 aa, Artificial Sequence
  Description of Artificial Sequence: Synthetic peptide
VVLKTGDLQPLEQPTSEAVEAPLVG

SEQ ID NO: 16499 - protein, 25 aa, Artificial Sequence
  Description of Artificial Sequence: Synthetic peptide
GGQPITNCVKMLCTHTGTGQAITVT

SEQ ID NO: 16500 - protein, 25 aa, Artificial Sequence
  Description of Artificial Sequence: Synthetic peptide
EDMLNPNYEDLLIRKSNHNFLVQAG

SEQ ID NO: 16501 - protein, 25 aa, Artificial Sequence
  Description of Artificial Sequence: Synthetic peptide
KNTVKSVGKFCLEASFNYLKSPNFS

SEQ ID NO: 16502 - protein, 25 aa, Artificial Sequence
  Description of Artificial Sequence: Synthetic peptide
TLETAQNSVRVLQKAAITILDGISQ

SEQ ID NO: 16503 - protein, 25 aa, Artificial Sequence
  Description of Artificial Sequence: Synthetic peptide
LETAQNSVRVLQKAAITILDGISQY

SEQ ID NO: 16504 - protein, 25 aa, Artificial Sequence
  Description of Artificial Sequence: Synthetic peptide
TEVLTEEVVLKTGDLQPLEQPTSEA

SEQ ID NO: 16505 - protein, 25 aa, Artificial Sequence
  Description of Artificial Sequence: Synthetic peptide
EVLTEEVVLKTGDLQPLEQPTSEAV

SEQ ID NO: 16506 - protein, 25 aa, Artificial Sequence
  Description of Artificial Sequence: Synthetic peptide
KASCTLSEQLDFIDTKRGVYCCREH

SEQ ID NO: 16507 - protein, 25 aa, Artificial Sequence
  Description of Artificial Sequence: Synthetic peptide
ASCTLSEQLDFIDTKRGVYCCREHE

SEQ ID NO: 16508 - protein, 25 aa, Artificial Sequence
  Description of Artificial Sequence: Synthetic peptide
EEAKKVKPTVVVNAANVYLKHGGGV

SEQ ID NO: 16509 - protein, 25 aa, Artificial Sequence
  Description of Artificial Sequence: Synthetic peptide
EAKKVKPTVVVNAANVYLKHGGGVA

SEQ ID NO: 16510 - protein, 25 aa, Artificial Sequence
  Description of Artificial Sequence: Synthetic peptide
VEEAKKVKPTVVVNAANVYLKHGGG

SEQ ID NO: 16511 - protein, 25 aa, Artificial Sequence
  Description of Artificial Sequence: Synthetic peptide
VYEKLKPVLDWLEEKFKEGVEFLRD

SEQ ID NO: 16512 - protein, 25 aa, Artificial Sequence
  Description of Artificial Sequence: Synthetic peptide
GNALDQAISMWALIISVTSNYSGVV

SEQ ID NO: 16513 - protein, 25 aa, Artificial Sequence
  Description of Artificial Sequence: Synthetic peptide
NALDQAISMWALIISVTSNYSGVVT

SEQ ID NO: 16514 - protein, 25 aa, Artificial Sequence
  Description of Artificial Sequence: Synthetic peptide
KPTVVVNAANVYLKHGGGVAGALNK

SEQ ID NO: 16515 - protein, 25 aa, Artificial Sequence
  Description of Artificial Sequence: Synthetic peptide
VLDMCASLKELLQNGMNGRTILGSA

SEQ ID NO: 16516 - protein, 25 aa, Artificial Sequence
  Description of Artificial Sequence: Synthetic peptide
AYYNTTKGGRFVLALLSDLQDLKWA

SEQ ID NO: 16517 - protein, 25 aa, Artificial Sequence
  Description of Artificial Sequence: Synthetic peptide
KGGRFVLALLSDLQDLKWARFPKSD

SEQ ID NO: 16518 - protein, 25 aa, Artificial Sequence
  Description of Artificial Sequence: Synthetic peptide
SAMVRMYIFFASFYYVWKSYVHVVD

SEQ ID NO: 16519 - protein, 25 aa, Artificial Sequence
  Description of Artificial Sequence: Synthetic peptide
IAVLDMCASLKELLQNGMNGRTILG

SEQ ID NO: 16520 - protein, 25 aa, Artificial Sequence
  Description of Artificial Sequence: Synthetic peptide
GIAVLDMCASLKELLQNGMNGRTIL

SEQ ID NO: 16521 - protein, 25 aa, Artificial Sequence
  Description of Artificial Sequence: Synthetic peptide
VQTIEVNSFSGYLKLTDNVYIKNAD

SEQ ID NO: 16522 - protein, 25 aa, Artificial Sequence
  Description of Artificial Sequence: Synthetic peptide
VDLPIGINITRFQTLLALHRSYLTP

SEQ ID NO: 16523 - protein, 25 aa, Artificial Sequence
  Description of Artificial Sequence: Synthetic peptide
LPIGINITRFQTLLALHRSYLTPGD

SEQ ID NO: 16524 - protein, 25 aa, Artificial Sequence
  Description of Artificial Sequence: Synthetic peptide
DLPIGINITRFQTLLALHRSYLTPG

SEQ ID NO: 16525 - protein, 25 aa, Artificial Sequence
  Description of Artificial Sequence: Synthetic peptide
VCSVIDLLLDDFVEIIKSQDLSVVS

SEQ ID NO: 16526 - protein, 25 aa, Artificial Sequence
  Description of Artificial Sequence: Synthetic peptide
LSFKELLVYAADPAMHAASGNLLLD

SEQ ID NO: 16527 - protein, 25 aa, Artificial Sequence
  Description of Artificial Sequence: Synthetic peptide
SRLSFKELLVYAADPAMHAASGNLL

SEQ ID NO: 16528 - protein, 25 aa, Artificial Sequence
  Description of Artificial Sequence: Synthetic peptide
RLSFKELLVYAADPAMHAASGNLLL

SEQ ID NO: 16529 - protein, 25 aa, Artificial Sequence
  Description of Artificial Sequence: Synthetic peptide
CPAEIVDTVSALVYDNKLKAHKDKS

SEQ ID NO: 16530 - protein, 25 aa, Artificial Sequence
  Description of Artificial Sequence: Synthetic peptide
DFGGFNFSQILPDPSKPSKRSFIED

SEQ ID NO: 16531 - protein, 25 aa, Artificial Sequence
  Description of Artificial Sequence: Synthetic peptide
KDFGGFNFSQILPDPSKPSKRSFIE

SEQ ID NO: 16532 - protein, 25 aa, Artificial Sequence
  Description of Artificial Sequence: Synthetic peptide
FGGFNFSQILPDPSKPSKRSFIEDL

SEQ ID NO: 16533 - protein, 25 aa, Artificial Sequence
  Description of Artificial Sequence: Synthetic peptide
LEIPRRNVATLQAENVTGLFKDCSK

SEQ ID NO: 16534 - protein, 25 aa, Artificial Sequence
  Description of Artificial Sequence: Synthetic peptide
IDLLLDDFVEIIKSQDLSVVSKVVK

SEQ ID NO: 16535 - protein, 25 aa, Artificial Sequence
  Description of Artificial Sequence: Synthetic peptide
SVIDLLLDDFVEIIKSQDLSVVSKV

SEQ ID NO: 16536 - protein, 25 aa, Artificial Sequence
  Description of Artificial Sequence: Synthetic peptide
VIDLLLDDFVEIIKSQDLSVVSKVV

SEQ ID NO: 16537 - protein, 25 aa, Artificial Sequence
  Description of Artificial Sequence: Synthetic peptide
YKQFDTYNLWNTFTRLQSLENVAFN

SEQ ID NO: 16538 - protein, 25 aa, Artificial Sequence
  Description of Artificial Sequence: Synthetic peptide
DTYNLWNTFTRLQSLENVAFNVVNK

SEQ ID NO: 16539 - protein, 25 aa, Artificial Sequence
  Description of Artificial Sequence: Synthetic peptide
DLPKEITVATSRTLSYYKLGASQRV

SEQ ID NO: 16540 - protein, 25 aa, Artificial Sequence
  Description of Artificial Sequence: Synthetic peptide
MADSNGTITVEELKKLLEQWNLVIG

SEQ ID NO: 16541 - protein, 25 aa, Artificial Sequence
  Description of Artificial Sequence: Synthetic peptide
IGINITRFQTLLALHRSYLTPGDSS

SEQ ID NO: 16542 - protein, 25 aa, Artificial Sequence
  Description of Artificial Sequence: Synthetic peptide
GINITRFQTLLALHRSYLTPGDSSS

SEQ ID NO: 16543 - protein, 25 aa, Artificial Sequence
  Description of Artificial Sequence: Synthetic peptide
YPSARIVYTACSHAAVDALCEKALK

SEQ ID NO: 16544 - protein, 25 aa, Artificial Sequence
  Description of Artificial Sequence: Synthetic peptide
AMPNMLRIMASLVLARKHTTCCSLS

SEQ ID NO: 16545 - protein, 25 aa, Artificial Sequence
  Description of Artificial Sequence: Synthetic peptide
GIPKDMTYRRLISMMGFKMNYQVNG

SEQ ID NO: 16546 - protein, 25 aa, Artificial Sequence
  Description of Artificial Sequence: Synthetic peptide
PGIPKDMTYRRLISMMGFKMNYQVN

SEQ ID NO: 16547 - protein, 25 aa, Artificial Sequence
  Description of Artificial Sequence: Synthetic peptide
ALLAVFQSASKIITLKKRWQLALSK

SEQ ID NO: 16548 - protein, 25 aa, Artificial Sequence
  Description of Artificial Sequence: Synthetic peptide
LLAVFQSASKIITLKKRWQLALSKG

SEQ ID NO: 16549 - protein, 25 aa, Artificial Sequence
  Description of Artificial Sequence: Synthetic peptide
VALLAVFQSASKIITLKKRWQLALS

SEQ ID NO: 16550 - protein, 25 aa, Artificial Sequence
  Description of Artificial Sequence: Synthetic peptide
PPLNRNYVFTGYRVTKNSKVQIGEY

SEQ ID NO: 16551 - protein, 25 aa, Artificial Sequence
  Description of Artificial Sequence: Synthetic peptide
RPPLNRNYVFTGYRVTKNSKVQIGE

SEQ ID NO: 16552 - protein, 25 aa, Artificial Sequence
  Description of Artificial Sequence: Synthetic peptide
PIGINITRFQTLLALHRSYLTPGDS

SEQ ID NO: 16553 - protein, 25 aa, Artificial Sequence
  Description of Artificial Sequence: Synthetic peptide
AVMYMGTLSYEQFKKGVQIPCTCGK

SEQ ID NO: 16554 - protein, 25 aa, Artificial Sequence
  Description of Artificial Sequence: Synthetic peptide
KHGTFTCASEYTGNYQCGHYKHITS

SEQ ID NO: 16555 - protein, 25 aa, Artificial Sequence
  Description of Artificial Sequence: Synthetic peptide
HGTFTCASEYTGNYQCGHYKHITSK

SEQ ID NO: 16556 - protein, 25 aa, Artificial Sequence
  Description of Artificial Sequence: Synthetic peptide
ICYTPSKLIEYTDFATSACVLAAEC

SEQ ID NO: 16557 - protein, 25 aa, Artificial Sequence
  Description of Artificial Sequence: Synthetic peptide
TPSKLIEYTDFATSACVLAAECTIF

SEQ ID NO: 16558 - protein, 25 aa, Artificial Sequence
  Description of Artificial Sequence: Synthetic peptide
SAVGNICYTPSKLIEYTDFATSACV

SEQ ID NO: 16559 - protein, 25 aa, Artificial Sequence
  Description of Artificial Sequence: Synthetic peptide
PPIKDFGGFNFSQILPDPSKPSKRS

SEQ ID NO: 16560 - protein, 25 aa, Artificial Sequence
  Description of Artificial Sequence: Synthetic peptide
FSAVGNICYTPSKLIEYTDFATSAC

SEQ ID NO: 16561 - protein, 25 aa, Artificial Sequence
  Description of Artificial Sequence: Synthetic peptide
RVFSAVGNICYTPSKLIEYTDFATS

SEQ ID NO: 16562 - protein, 25 aa, Artificial Sequence
  Description of Artificial Sequence: Synthetic peptide
VFSAVGNICYTPSKLIEYTDFATSA

SEQ ID NO: 16563 - protein, 25 aa, Artificial Sequence
  Description of Artificial Sequence: Synthetic peptide
VGDYFVLTSHTVMPLSAPTLVPQEH

SEQ ID NO: 16564 - protein, 25 aa, Artificial Sequence
  Description of Artificial Sequence: Synthetic peptide
LAWPLIVTALRANSAVKLQNNELSP

SEQ ID NO: 16565 - protein, 25 aa, Artificial Sequence
  Description of Artificial Sequence: Synthetic peptide
VPANSTVLSFCAFAVDAAKAYKDYL

SEQ ID NO: 16566 - protein, 25 aa, Artificial Sequence
  Description of Artificial Sequence: Synthetic peptide
KSILSPLYAFASEAARVVRSIFSRT

SEQ ID NO: 16567 - protein, 25 aa, Artificial Sequence
  Description of Artificial Sequence: Synthetic peptide
QKSILSPLYAFASEAARVVRSIFSR

SEQ ID NO: 16568 - protein, 25 aa, Artificial Sequence
  Description of Artificial Sequence: Synthetic peptide
IPLTTAAKLMVVIPDYNTYKNTCDG

SEQ ID NO: 16569 - protein, 25 aa, Artificial Sequence
  Description of Artificial Sequence: Synthetic peptide
LSPLYAFASEAARVVRSIFSRTLET

SEQ ID NO: 16570 - protein, 25 aa, Artificial Sequence
  Description of Artificial Sequence: Synthetic peptide
ILSPLYAFASEAARVVRSIFSRTLE

SEQ ID NO: 16571 - protein, 25 aa, Artificial Sequence
  Description of Artificial Sequence: Synthetic peptide
KQFDTYNLWNTFTRLQSLENVAFNV

SEQ ID NO: 16572 - protein, 25 aa, Artificial Sequence
  Description of Artificial Sequence: Synthetic peptide
QFDTYNLWNTFTRLQSLENVAFNVV

SEQ ID NO: 16573 - protein, 25 aa, Artificial Sequence
  Description of Artificial Sequence: Synthetic peptide
FDTYNLWNTFTRLQSLENVAFNVVN

SEQ ID NO: 16574 - protein, 25 aa, Artificial Sequence
  Description of Artificial Sequence: Synthetic peptide
LPDDFTGCVIAWNSNNLDSKVGGNY

SEQ ID NO: 16575 - protein, 25 aa, Artificial Sequence
  Description of Artificial Sequence: Synthetic peptide
NYKLPDDFTGCVIAWNSNNLDSKVG

SEQ ID NO: 16576 - protein, 25 aa, Artificial Sequence
  Description of Artificial Sequence: Synthetic peptide
KLPDDFTGCVIAWNSNNLDSKVGGN

SEQ ID NO: 16577 - protein, 25 aa, Artificial Sequence
  Description of Artificial Sequence: Synthetic peptide
YKLPDDFTGCVIAWNSNNLDSKVGG

SEQ ID NO: 16578 - protein, 25 aa, Artificial Sequence
  Description of Artificial Sequence: Synthetic peptide
GRCDIKDLPKEITVATSRTLSYYKL

SEQ ID NO: 16579 - protein, 25 aa, Artificial Sequence
  Description of Artificial Sequence: Synthetic peptide
RGMVLGSLAATVRLQAGNATEVPAN

SEQ ID NO: 16580 - protein, 25 aa, Artificial Sequence
  Description of Artificial Sequence: Synthetic peptide
GMVLGSLAATVRLQAGNATEVPANS

SEQ ID NO: 16581 - protein, 25 aa, Artificial Sequence
  Description of Artificial Sequence: Synthetic peptide
TSNPTTFHLDGEVITFDNLKTLLSL

SEQ ID NO: 16582 - protein, 25 aa, Artificial Sequence
  Description of Artificial Sequence: Synthetic peptide
YTSNPTTFHLDGEVITFDNLKTLLS

SEQ ID NO: 16583 - protein, 25 aa, Artificial Sequence
  Description of Artificial Sequence: Synthetic peptide
STVLSFCAFAVDAAKAYKDYLASGG

SEQ ID NO: 16584 - protein, 25 aa, Artificial Sequence
  Description of Artificial Sequence: Synthetic peptide
FTLLLQLCTFTRSTNSRIKASMPTT

SEQ ID NO: 16585 - protein, 25 aa, Artificial Sequence
  Description of Artificial Sequence: Synthetic peptide
FFTLLLQLCTFTRSTNSRIKASMPT

SEQ ID NO: 16586 - protein, 25 aa, Artificial Sequence
  Description of Artificial Sequence: Synthetic peptide
YITTYPGQGLNGYTVEEAKTVLKKC

SEQ ID NO: 16587 - protein, 25 aa, Artificial Sequence
  Description of Artificial Sequence: Synthetic peptide
AKKNNLPFKLTCATTRQVVNVVTTK

SEQ ID NO: 16588 - protein, 25 aa, Artificial Sequence
  Description of Artificial Sequence: Synthetic peptide
KKNNLPFKLTCATTRQVVNVVTTKI

SEQ ID NO: 16589 - protein, 25 aa, Artificial Sequence
  Description of Artificial Sequence: Synthetic peptide
NGECPNFVFPLNSIIKTIQPRVEKK

SEQ ID NO: 16590 - protein, 25 aa, Artificial Sequence
  Description of Artificial Sequence: Synthetic peptide
LNVGDYFVLTSHTVMPLSAPTLVPQ

SEQ ID NO: 16591 - protein, 25 aa, Artificial Sequence
  Description of Artificial Sequence: Synthetic peptide
YDTNVLEGSVAYESLRPDTRYVLMD

SEQ ID NO: 16592 - protein, 25 aa, Artificial Sequence
  Description of Artificial Sequence: Synthetic peptide
NVGDYFVLTSHTVMPLSAPTLVPQE

SEQ ID NO: 16593 - protein, 25 aa, Artificial Sequence
  Description of Artificial Sequence: Synthetic peptide
TLLSLREVRTIKVFTTVDNINLHTQ

SEQ ID NO: 16594 - protein, 25 aa, Artificial Sequence
  Description of Artificial Sequence: Synthetic peptide
SAAKKNNLPFKLTCATTRQVVNVVT

SEQ ID NO: 16595 - protein, 25 aa, Artificial Sequence
  Description of Artificial Sequence: Synthetic peptide
AAKKNNLPFKLTCATTRQVVNVVTT

SEQ ID NO: 16596 - protein, 25 aa, Artificial Sequence
  Description of Artificial Sequence: Synthetic peptide
MPYFFTLLLQLCTFTRSTNSRIKAS

SEQ ID NO: 16597 - protein, 25 aa, Artificial Sequence
  Description of Artificial Sequence: Synthetic peptide
NYMPYFFTLLLQLCTFTRSTNSRIK

SEQ ID NO: 16598 - protein, 25 aa, Artificial Sequence
  Description of Artificial Sequence: Synthetic peptide
YMPYFFTLLLQLCTFTRSTNSRIKA

SEQ ID NO: 16599 - protein, 25 aa, Artificial Sequence
  Description of Artificial Sequence: Synthetic peptide
EEIAIILASFSASTSAFVETVKGLD

SEQ ID NO: 16600 - protein, 25 aa, Artificial Sequence
  Description of Artificial Sequence: Synthetic peptide
LNEEIAIILASFSASTSAFVETVKG

SEQ ID NO: 16601 - protein, 25 aa, Artificial Sequence
  Description of Artificial Sequence: Synthetic peptide
EIAIILASFSASTSAFVETVKGLDY

SEQ ID NO: 16602 - protein, 25 aa, Artificial Sequence
  Description of Artificial Sequence: Synthetic peptide
NEEIAIILASFSASTSAFVETVKGL

SEQ ID NO: 16603 - protein, 25 aa, Artificial Sequence
  Description of Artificial Sequence: Synthetic peptide
GCVPLNIIPLTTAAKLMVVIPDYNT

SEQ ID NO: 16604 - protein, 25 aa, Artificial Sequence
  Description of Artificial Sequence: Synthetic peptide
LPSYAAFATAQEAYEQAVANGDSEV

SEQ ID NO: 16605 - protein, 25 aa, Artificial Sequence
  Description of Artificial Sequence: Synthetic peptide
DNVLSTFISAARQGFVDSDVETKDV

SEQ ID NO: 16606 - protein, 25 aa, Artificial Sequence
  Description of Artificial Sequence: Synthetic peptide
AKALRKVPTDNYITTYPGQGLNGYT

SEQ ID NO: 16607 - protein, 25 aa, Artificial Sequence
  Description of Artificial Sequence: Synthetic peptide
FKLVNKFLALCADSIIIGGAKLKAL

SEQ ID NO: 16608 - protein, 25 aa, Artificial Sequence
  Description of Artificial Sequence: Synthetic peptide
TFFKLVNKFLALCADSIIIGGAKLK

SEQ ID NO: 16609 - protein, 25 aa, Artificial Sequence
  Description of Artificial Sequence: Synthetic peptide
FFKLVNKFLALCADSIIIGGAKLKA

SEQ ID NO: 16610 - protein, 25 aa, Artificial Sequence
  Description of Artificial Sequence: Synthetic peptide
DVVRQCSGVTFQSAVKRTIKGTHHW

SEQ ID NO: 16611 - protein, 25 aa, Artificial Sequence
  Description of Artificial Sequence: Synthetic peptide
CVMYASAVVLLILMTARTVYDDGAR

SEQ ID NO: 16612 - protein, 25 aa, Artificial Sequence
  Description of Artificial Sequence: Synthetic peptide
AAKAYKDYLASGGQPITNCVKMLCT

SEQ ID NO: 16613 - protein, 25 aa, Artificial Sequence
  Description of Artificial Sequence: Synthetic peptide
VLLPLTQYNRYLALYNKYKYFSGAM

SEQ ID NO: 16614 - protein, 25 aa, Artificial Sequence
  Description of Artificial Sequence: Synthetic peptide
DVLLPLTQYNRYLALYNKYKYFSGA

SEQ ID NO: 16615 - protein, 25 aa, Artificial Sequence
  Description of Artificial Sequence: Synthetic peptide
LLPLTQYNRYLALYNKYKYFSGAMD

SEQ ID NO: 16616 - protein, 25 aa, Artificial Sequence
  Description of Artificial Sequence: Synthetic peptide
LPLTQYNRYLALYNKYKYFSGAMDT

SEQ ID NO: 16617 - protein, 25 aa, Artificial Sequence
  Description of Artificial Sequence: Synthetic peptide
DNLKTLLSLREVRTIKVFTTVDNIN

SEQ ID NO: 16618 - protein, 25 aa, Artificial Sequence
  Description of Artificial Sequence: Synthetic peptide
GDFLHFLPRVFSAVGNICYTPSKLI

SEQ ID NO: 16619 - protein, 25 aa, Artificial Sequence
  Description of Artificial Sequence: Synthetic peptide
CPNFVFPLNSIIKTIQPRVEKKKLD

SEQ ID NO: 16620 - protein, 25 aa, Artificial Sequence
  Description of Artificial Sequence: Synthetic peptide
VDTANPKTPKYKFVRIQPGQTFSVL

SEQ ID NO: 16621 - protein, 25 aa, Artificial Sequence
  Description of Artificial Sequence: Synthetic peptide
KVDTANPKTPKYKFVRIQPGQTFSV

SEQ ID NO: 16622 - protein, 25 aa, Artificial Sequence
  Description of Artificial Sequence: Synthetic peptide
VEQRKQDDKKIKACVEEVTTTLEET

SEQ ID NO: 16623 - protein, 25 aa, Artificial Sequence
  Description of Artificial Sequence: Synthetic peptide
SVEQRKQDDKKIKACVEEVTTTLEE

SEQ ID NO: 16624 - protein, 25 aa, Artificial Sequence
  Description of Artificial Sequence: Synthetic peptide
NVLEGSVAYESLRPDTRYVLMDGSI

SEQ ID NO: 16625 - protein, 25 aa, Artificial Sequence
  Description of Artificial Sequence: Synthetic peptide
FEYYHTTDPSFLGRYMSALNHTKKW

SEQ ID NO: 16626 - protein, 25 aa, Artificial Sequence
  Description of Artificial Sequence: Synthetic peptide
ASTSAFVETVKGLDYKAFKQIVESC

SEQ ID NO: 16627 - protein, 25 aa, Artificial Sequence
  Description of Artificial Sequence: Synthetic peptide
CDNIKFADDLNQLTGYKKPASRELK

SEQ ID NO: 16628 - protein, 25 aa, Artificial Sequence
  Description of Artificial Sequence: Synthetic peptide
ELAKNVSLDNVLSTFISAARQGFVD

SEQ ID NO: 16629 - protein, 25 aa, Artificial Sequence
  Description of Artificial Sequence: Synthetic peptide
LTSSSKTPEEHFIETISLAGSYKDW

SEQ ID NO: 16630 - protein, 25 aa, Artificial Sequence
  Description of Artificial Sequence: Synthetic peptide
CALAPNMMVTNNTFTLKGGAPTKVT

SEQ ID NO: 16631 - protein, 25 aa, Artificial Sequence
  Description of Artificial Sequence: Synthetic peptide
LAPNMMVTNNTFTLKGGAPTKVTFG

SEQ ID NO: 16632 - protein, 25 aa, Artificial Sequence
  Description of Artificial Sequence: Synthetic peptide
ALAPNMMVTNNTFTLKGGAPTKVTF

SEQ ID NO: 16633 - protein, 25 aa, Artificial Sequence
  Description of Artificial Sequence: Synthetic peptide
IKFADDLNQLTGYKKPASRELKVTF

SEQ ID NO: 16634 - protein, 25 aa, Artificial Sequence
  Description of Artificial Sequence: Synthetic peptide
FADDLNQLTGYKKPASRELKVTFFP

SEQ ID NO: 16635 - protein, 25 aa, Artificial Sequence
  Description of Artificial Sequence: Synthetic peptide
NIKFADDLNQLTGYKKPASRELKVT

SEQ ID NO: 16636 - protein, 25 aa, Artificial Sequence
  Description of Artificial Sequence: Synthetic peptide
KFADDLNQLTGYKKPASRELKVTFF

SEQ ID NO: 16637 - protein, 25 aa, Artificial Sequence
  Description of Artificial Sequence: Synthetic peptide
PNYEDLLIRKSNHNFLVQAGNVQLR

SEQ ID NO: 16638 - protein, 25 aa, Artificial Sequence
  Description of Artificial Sequence: Synthetic peptide
NSPNLAWPLIVTALRANSAVKLQNN

SEQ ID NO: 16639 - protein, 25 aa, Artificial Sequence
  Description of Artificial Sequence: Synthetic peptide
DNSPNLAWPLIVTALRANSAVKLQN

SEQ ID NO: 16640 - protein, 25 aa, Artificial Sequence
  Description of Artificial Sequence: Synthetic peptide
QDDKKIKACVEEVTTTLEETKFLTE

SEQ ID NO: 16641 - protein, 25 aa, Artificial Sequence
  Description of Artificial Sequence: Synthetic peptide
DDKKIKACVEEVTTTLEETKFLTEN

SEQ ID NO: 16642 - protein, 25 aa, Artificial Sequence
  Description of Artificial Sequence: Synthetic peptide
SASIVAGGIVAIVVTCLAYYFMRFR

SEQ ID NO: 16643 - protein, 25 aa, Artificial Sequence
  Description of Artificial Sequence: Synthetic peptide
SIVAGGIVAIVVTCLAYYFMRFRRA

SEQ ID NO: 16644 - protein, 25 aa, Artificial Sequence
  Description of Artificial Sequence: Synthetic peptide
IVAGGIVAIVVTCLAYYFMRFRRAF

SEQ ID NO: 16645 - protein, 25 aa, Artificial Sequence
  Description of Artificial Sequence: Synthetic peptide
ASIVAGGIVAIVVTCLAYYFMRFRR

SEQ ID NO: 16646 - protein, 25 aa, Artificial Sequence
  Description of Artificial Sequence: Synthetic peptide
FACVVADAVIKTLQPVSELLTPLGI

SEQ ID NO: 16647 - protein, 25 aa, Artificial Sequence
  Description of Artificial Sequence: Synthetic peptide
VVADAVIKTLQPVSELLTPLGIDLD

SEQ ID NO: 16648 - protein, 25 aa, Artificial Sequence
  Description of Artificial Sequence: Synthetic peptide
ACVVADAVIKTLQPVSELLTPLGID

SEQ ID NO: 16649 - protein, 25 aa, Artificial Sequence
  Description of Artificial Sequence: Synthetic peptide
EFACVVADAVIKTLQPVSELLTPLG

SEQ ID NO: 16650 - protein, 25 aa, Artificial Sequence
  Description of Artificial Sequence: Synthetic peptide
CVVADAVIKTLQPVSELLTPLGIDL

SEQ ID NO: 16651 - protein, 25 aa, Artificial Sequence
  Description of Artificial Sequence: Synthetic peptide
LSGLDSLDTYPSLETIQITISSFKW

SEQ ID NO: 16652 - protein, 25 aa, Artificial Sequence
  Description of Artificial Sequence: Synthetic peptide
SGLDSLDTYPSLETIQITISSFKWD

SEQ ID NO: 16653 - protein, 25 aa, Artificial Sequence
  Description of Artificial Sequence: Synthetic peptide
CLSGLDSLDTYPSLETIQITISSFK

SEQ ID NO: 16654 - protein, 25 aa, Artificial Sequence
  Description of Artificial Sequence: Synthetic peptide
KAPKEIIFLEGETLPTEVLTEEVVL

SEQ ID NO: 16655 - protein, 25 aa, Artificial Sequence
  Description of Artificial Sequence: Synthetic peptide
APKEIIFLEGETLPTEVLTEEVVLK

SEQ ID NO: 16656 - protein, 25 aa, Artificial Sequence
  Description of Artificial Sequence: Synthetic peptide
DPSFLGRYMSALNHTKKWKYPQVNG

SEQ ID NO: 16657 - protein, 25 aa, Artificial Sequence
  Description of Artificial Sequence: Synthetic peptide
ERSEKSYELQTPFEIKLAKKFDTFN

SEQ ID NO: 16658 - protein, 25 aa, Artificial Sequence
  Description of Artificial Sequence: Synthetic peptide
EKMADQAMTQMYKQARSEDKRAKVT

SEQ ID NO: 16659 - protein, 25 aa, Artificial Sequence
  Description of Artificial Sequence: Synthetic peptide
LEKMADQAMTQMYKQARSEDKRAKV

SEQ ID NO: 16660 - protein, 25 aa, Artificial Sequence
  Description of Artificial Sequence: Synthetic peptide
LAVFQSASKIITLKKRWQLALSKGV

SEQ ID NO: 16661 - protein, 25 aa, Artificial Sequence
  Description of Artificial Sequence: Synthetic peptide
VSSPDAVTAYNGYLTSSSKTPEEHF

SEQ ID NO: 16662 - protein, 25 aa, Artificial Sequence
  Description of Artificial Sequence: Synthetic peptide
SVSSPDAVTAYNGYLTSSSKTPEEH

SEQ ID NO: 16663 - protein, 25 aa, Artificial Sequence
  Description of Artificial Sequence: Synthetic peptide
VSVSSPDAVTAYNGYLTSSSKTPEE

SEQ ID NO: 16664 - protein, 25 aa, Artificial Sequence
  Description of Artificial Sequence: Synthetic peptide
VLNNDYYRSLPGVFCGVDAVNLLTN

SEQ ID NO: 16665 - protein, 25 aa, Artificial Sequence
  Description of Artificial Sequence: Synthetic peptide
VESDDYIATNGPLKVGGSCVLSGHN

SEQ ID NO: 16666 - protein, 25 aa, Artificial Sequence
  Description of Artificial Sequence: Synthetic peptide
QAVANGDSEVVLKKLKKSLNVAKSE

SEQ ID NO: 16667 - protein, 25 aa, Artificial Sequence
  Description of Artificial Sequence: Synthetic peptide
NASFDNFKFVCDNIKFADDLNQLTG

SEQ ID NO: 16668 - protein, 25 aa, Artificial Sequence
  Description of Artificial Sequence: Synthetic peptide
LHNDILLAKDTTEAFEKMVSLLSVL

SEQ ID NO: 16669 - protein, 25 aa, Artificial Sequence
  Description of Artificial Sequence: Synthetic peptide
CVQLHNDILLAKDTTEAFEKMVSLL

SEQ ID NO: 16670 - protein, 25 aa, Artificial Sequence
  Description of Artificial Sequence: Synthetic peptide
QLHNDILLAKDTTEAFEKMVSLLSV

SEQ ID NO: 16671 - protein, 25 aa, Artificial Sequence
  Description of Artificial Sequence: Synthetic peptide
VQLHNDILLAKDTTEAFEKMVSLLS

SEQ ID NO: 16672 - protein, 25 aa, Artificial Sequence
  Description of Artificial Sequence: Synthetic peptide
QCVQLHNDILLAKDTTEAFEKMVSL

SEQ ID NO: 16673 - protein, 25 aa, Artificial Sequence
  Description of Artificial Sequence: Synthetic peptide
GQQQTTLKGVEAVMYMGTLSYEQFK

SEQ ID NO: 16674 - protein, 25 aa, Artificial Sequence
  Description of Artificial Sequence: Synthetic peptide
VLLILMTARTVYDDGARRVWTLMNV

SEQ ID NO: 16675 - protein, 25 aa, Artificial Sequence
  Description of Artificial Sequence: Synthetic peptide
LILMTARTVYDDGARRVWTLMNVLT

SEQ ID NO: 16676 - protein, 25 aa, Artificial Sequence
  Description of Artificial Sequence: Synthetic peptide
RATLQAIASEFSSLPSYAAFATAQE

SEQ ID NO: 16677 - protein, 25 aa, Artificial Sequence
  Description of Artificial Sequence: Synthetic peptide
FQHANLDSCKRVLNVVCKTCGQQQT

SEQ ID NO: 16678 - protein, 25 aa, Artificial Sequence
  Description of Artificial Sequence: Synthetic peptide
GDSCNNYMLTYNKVENMTPRDLGAC

SEQ ID NO: 16679 - protein, 25 aa, Artificial Sequence
  Description of Artificial Sequence: Synthetic peptide
LVFLFVAAIFYLITPVHVMSKHTDF

SEQ ID NO: 16680 - protein, 25 aa, Artificial Sequence
  Description of Artificial Sequence: Synthetic peptide
IDYDCVSFCYMHHMELPTGVHAGTD

SEQ ID NO: 16681 - protein, 25 aa, Artificial Sequence
  Description of Artificial Sequence: Synthetic peptide
FNIDYDCVSFCYMHHMELPTGVHAG

SEQ ID NO: 16682 - protein, 25 aa, Artificial Sequence
  Description of Artificial Sequence: Synthetic peptide
NIDYDCVSFCYMHHMELPTGVHAGT

SEQ ID NO: 16683 - protein, 25 aa, Artificial Sequence
  Description of Artificial Sequence: Synthetic peptide
GFNIDYDCVSFCYMHHMELPTGVHA

SEQ ID NO: 16684 - protein, 25 aa, Artificial Sequence
  Description of Artificial Sequence: Synthetic peptide
VGFNIDYDCVSFCYMHHMELPTGVH

SEQ ID NO: 16685 - protein, 25 aa, Artificial Sequence
  Description of Artificial Sequence: Synthetic peptide
SVGFNIDYDCVSFCYMHHMELPTGV

SEQ ID NO: 16686 - protein, 25 aa, Artificial Sequence
  Description of Artificial Sequence: Synthetic peptide
RYVLMDGSIIQFPNTYLEGSVRVVT

SEQ ID NO: 16687 - protein, 25 aa, Artificial Sequence
  Description of Artificial Sequence: Synthetic peptide
TRYVLMDGSIIQFPNTYLEGSVRVV

SEQ ID NO: 16688 - protein, 25 aa, Artificial Sequence
  Description of Artificial Sequence: Synthetic peptide
PDTRYVLMDGSIIQFPNTYLEGSVR

SEQ ID NO: 16689 - protein, 25 aa, Artificial Sequence
  Description of Artificial Sequence: Synthetic peptide
YVLMDGSIIQFPNTYLEGSVRVVTT

SEQ ID NO: 16690 - protein, 25 aa, Artificial Sequence
  Description of Artificial Sequence: Synthetic peptide
VLMDGSIIQFPNTYLEGSVRVVTTF

SEQ ID NO: 16691 - protein, 25 aa, Artificial Sequence
  Description of Artificial Sequence: Synthetic peptide
DTRYVLMDGSIIQFPNTYLEGSVRV

SEQ ID NO: 16692 - protein, 25 aa, Artificial Sequence
  Description of Artificial Sequence: Synthetic peptide
RKLEKMADQAMTQMYKQARSEDKRA

SEQ ID NO: 16693 - protein, 25 aa, Artificial Sequence
  Description of Artificial Sequence: Synthetic peptide
DSEVVLKKLKKSLNVAKSEFDRDAA

SEQ ID NO: 16694 - protein, 25 aa, Artificial Sequence
  Description of Artificial Sequence: Synthetic peptide
TSVVLLSVLQQLRVESSSKLWAQCV

SEQ ID NO: 16695 - protein, 25 aa, Artificial Sequence
  Description of Artificial Sequence: Synthetic peptide
IVGDVVQEGVLTAVVIPTKKAGGTT

SEQ ID NO: 16696 - protein, 25 aa, Artificial Sequence
  Description of Artificial Sequence: Synthetic peptide
IFSRTLETAQNSVRVLQKAAITILD

SEQ ID NO: 16697 - protein, 25 aa, Artificial Sequence
  Description of Artificial Sequence: Synthetic peptide
RTVYDDGARRVWTLMNVLTLVYKVY

SEQ ID NO: 16698 - protein, 25 aa, Artificial Sequence
  Description of Artificial Sequence: Synthetic peptide
TVYDDGARRVWTLMNVLTLVYKVYY

SEQ ID NO: 16699 - protein, 25 aa, Artificial Sequence
  Description of Artificial Sequence: Synthetic peptide
EGVLTAVVIPTKKAGGTTEMLAKAL

SEQ ID NO: 16700 - protein, 25 aa, Artificial Sequence
  Description of Artificial Sequence: Synthetic peptide
EGSVRVVTTFDSEYCRHGTCERSEA

SEQ ID NO: 16701 - protein, 25 aa, Artificial Sequence
  Description of Artificial Sequence: Synthetic peptide
GSVRVVTTFDSEYCRHGTCERSEAG

SEQ ID NO: 16702 - protein, 25 aa, Artificial Sequence
  Description of Artificial Sequence: Synthetic peptide
GSIIQFPNTYLEGSVRVVTTFDSEY

SEQ ID NO: 16703 - protein, 25 aa, Artificial Sequence
  Description of Artificial Sequence: Synthetic peptide
VRMYIFFASFYYVWKSYVHVVDGCN

SEQ ID NO: 16704 - protein, 25 aa, Artificial Sequence
  Description of Artificial Sequence: Synthetic peptide
RMYIFFASFYYVWKSYVHVVDGCNS

SEQ ID NO: 16705 - protein, 25 aa, Artificial Sequence
  Description of Artificial Sequence: Synthetic peptide
KALNLGETFVTHSKGLYRKCVKSRE

SEQ ID NO: 16706 - protein, 25 aa, Artificial Sequence
  Description of Artificial Sequence: Synthetic peptide
KLKALNLGETFVTHSKGLYRKCVKS

SEQ ID NO: 16707 - protein, 25 aa, Artificial Sequence
  Description of Artificial Sequence: Synthetic peptide
LNLGETFVTHSKGLYRKCVKSREET

SEQ ID NO: 16708 - protein, 25 aa, Artificial Sequence
  Description of Artificial Sequence: Synthetic peptide
ALNLGETFVTHSKGLYRKCVKSREE

SEQ ID NO: 16709 - protein, 25 aa, Artificial Sequence
  Description of Artificial Sequence: Synthetic peptide
LKALNLGETFVTHSKGLYRKCVKSR

SEQ ID NO: 16710 - protein, 25 aa, Artificial Sequence
  Description of Artificial Sequence: Synthetic peptide
LGETFVTHSKGLYRKCVKSREETGL

SEQ ID NO: 16711 - protein, 25 aa, Artificial Sequence
  Description of Artificial Sequence: Synthetic peptide
HEGKTFYVLPNDDTLRVEAFEYYHT

SEQ ID NO: 16712 - protein, 25 aa, Artificial Sequence
  Description of Artificial Sequence: Synthetic peptide
EGKTFYVLPNDDTLRVEAFEYYHTT

SEQ ID NO: 16713 - protein, 25 aa, Artificial Sequence
  Description of Artificial Sequence: Synthetic peptide
QTIEVNSFSGYLKLTDNVYIKNADI

SEQ ID NO: 16714 - protein, 25 aa, Artificial Sequence
  Description of Artificial Sequence: Synthetic peptide
AYIICISTKHFYWFFSNYLKRRVVF

SEQ ID NO: 16715 - protein, 25 aa, Artificial Sequence
  Description of Artificial Sequence: Synthetic peptide
NYAKPFLNKVVSTTTNIVTRCLNRV

SEQ ID NO: 16716 - protein, 25 aa, Artificial Sequence
  Description of Artificial Sequence: Synthetic peptide
ANYAKPFLNKVVSTTTNIVTRCLNR

SEQ ID NO: 16717 - protein, 25 aa, Artificial Sequence
  Description of Artificial Sequence: Synthetic peptide
YAKPFLNKVVSTTTNIVTRCLNRVC

SEQ ID NO: 16718 - protein, 25 aa, Artificial Sequence
  Description of Artificial Sequence: Synthetic peptide
AKPFLNKVVSTTTNIVTRCLNRVCT

SEQ ID NO: 16719 - protein, 25 aa, Artificial Sequence
  Description of Artificial Sequence: Synthetic peptide
LVPFWITIAYIICISTKHFYWFFSN

SEQ ID NO: 16720 - protein, 25 aa, Artificial Sequence
  Description of Artificial Sequence: Synthetic peptide
PLVPFWITIAYIICISTKHFYWFFS

SEQ ID NO: 16721 - protein, 25 aa, Artificial Sequence
  Description of Artificial Sequence: Synthetic peptide
WITIAYIICISTKHFYWFFSNYLKR

SEQ ID NO: 16722 - protein, 25 aa, Artificial Sequence
  Description of Artificial Sequence: Synthetic peptide
TIAYIICISTKHFYWFFSNYLKRRV

SEQ ID NO: 16723 - protein, 25 aa, Artificial Sequence
  Description of Artificial Sequence: Synthetic peptide
ITIAYIICISTKHFYWFFSNYLKRR

SEQ ID NO: 16724 - protein, 25 aa, Artificial Sequence
  Description of Artificial Sequence: Synthetic peptide
FWITIAYIICISTKHFYWFFSNYLK

SEQ ID NO: 16725 - protein, 25 aa, Artificial Sequence
  Description of Artificial Sequence: Synthetic peptide
VPFWITIAYIICISTKHFYWFFSNY

SEQ ID NO: 16726 - protein, 25 aa, Artificial Sequence
  Description of Artificial Sequence: Synthetic peptide
PFWITIAYIICISTKHFYWFFSNYL

SEQ ID NO: 16727 - protein, 25 aa, Artificial Sequence
  Description of Artificial Sequence: Synthetic peptide
TPLVPFWITIAYIICISTKHFYWFF

SEQ ID NO: 16728 - protein, 25 aa, Artificial Sequence
  Description of Artificial Sequence: Synthetic peptide
SHFVNLDNLRANNTKGSLPINVIVF

SEQ ID NO: 16729 - protein, 25 aa, Artificial Sequence
  Description of Artificial Sequence: Synthetic peptide
TTEAFEKMVSLLSVLLSMQGAVDIN

SEQ ID NO: 16730 - protein, 25 aa, Artificial Sequence
  Description of Artificial Sequence: Synthetic peptide
FNMVYMPASWVMRIMTWLDMVDTSL

SEQ ID NO: 16731 - protein, 25 aa, Artificial Sequence
  Description of Artificial Sequence: Synthetic peptide
LLEIKDTEKYCALAPNMMVTNNTFT

SEQ ID NO: 16732 - protein, 25 aa, Artificial Sequence
  Description of Artificial Sequence: Synthetic peptide
LEIKDTEKYCALAPNMMVTNNTFTL

SEQ ID NO: 16733 - protein, 25 aa, Artificial Sequence
  Description of Artificial Sequence: Synthetic peptide
DVKCTSVVLLSVLQQLRVESSSKLW

SEQ ID NO: 16734 - protein, 25 aa, Artificial Sequence
  Description of Artificial Sequence: Synthetic peptide
KCTSVVLLSVLQQLRVESSSKLWAQ

SEQ ID NO: 16735 - protein, 25 aa, Artificial Sequence
  Description of Artificial Sequence: Synthetic peptide
VKCTSVVLLSVLQQLRVESSSKLWA

SEQ ID NO: 16736 - protein, 25 aa, Artificial Sequence
  Description of Artificial Sequence: Synthetic peptide
CTSVVLLSVLQQLRVESSSKLWAQC

SEQ ID NO: 16737 - protein, 25 aa, Artificial Sequence
  Description of Artificial Sequence: Synthetic peptide
MSDVKCTSVVLLSVLQQLRVESSSK

SEQ ID NO: 16738 - protein, 25 aa, Artificial Sequence
  Description of Artificial Sequence: Synthetic peptide
PSFLGRYMSALNHTKKWKYPQVNGL

SEQ ID NO: 16739 - protein, 25 aa, Artificial Sequence
  Description of Artificial Sequence: Synthetic peptide
VGPNVNKGEDIQLLKSAYENFNQHE

SEQ ID NO: 16740 - protein, 25 aa, Artificial Sequence
  Description of Artificial Sequence: Synthetic peptide
VVGPNVNKGEDIQLLKSAYENFNQH

SEQ ID NO: 16741 - protein, 25 aa, Artificial Sequence
  Description of Artificial Sequence: Synthetic peptide
SAMQTMLFTMLRKLDNDALNNIINN

SEQ ID NO: 16742 - protein, 25 aa, Artificial Sequence
  Description of Artificial Sequence: Synthetic peptide
YTVEEAKTVLKKCKSAFYILPSIIS

SEQ ID NO: 16743 - protein, 25 aa, Artificial Sequence
  Description of Artificial Sequence: Synthetic peptide
GYTVEEAKTVLKKCKSAFYILPSII

SEQ ID NO: 16744 - protein, 25 aa, Artificial Sequence
  Description of Artificial Sequence: Synthetic peptide
YEKLKPVLDWLEEKFKEGVEFLRDG

SEQ ID NO: 16745 - protein, 25 aa, Artificial Sequence
  Description of Artificial Sequence: Synthetic peptide
EKLKPVLDWLEEKFKEGVEFLRDGW

SEQ ID NO: 16746 - protein, 25 aa, Artificial Sequence
  Description of Artificial Sequence: Synthetic peptide
LDQAISMWALIISVTSNYSGVVTTV

SEQ ID NO: 16747 - protein, 25 aa, Artificial Sequence
  Description of Artificial Sequence: Synthetic peptide
ALDQAISMWALIISVTSNYSGVVTT

SEQ ID NO: 16748 - protein, 25 aa, Artificial Sequence
  Description of Artificial Sequence: Synthetic peptide
YMPASWVMRIMTWLDMVDTSLSGFK

SEQ ID NO: 16749 - protein, 25 aa, Artificial Sequence
  Description of Artificial Sequence: Synthetic peptide
ITPVHVMSKHTDFSSEIIGYKAIDG

SEQ ID NO: 16750 - protein, 25 aa, Artificial Sequence
  Description of Artificial Sequence: Synthetic peptide
SCTLSEQLDFIDTKRGVYCCREHEH

SEQ ID NO: 16751 - protein, 25 aa, Artificial Sequence
  Description of Artificial Sequence: Synthetic peptide
TLSEQLDFIDTKRGVYCCREHEHEI

SEQ ID NO: 16752 - protein, 25 aa, Artificial Sequence
  Description of Artificial Sequence: Synthetic peptide
LSEQLDFIDTKRGVYCCREHEHEIA

SEQ ID NO: 16753 - protein, 25 aa, Artificial Sequence
  Description of Artificial Sequence: Synthetic peptide
CTLSEQLDFIDTKRGVYCCREHEHE

SEQ ID NO: 16754 - protein, 25 aa, Artificial Sequence
  Description of Artificial Sequence: Synthetic peptide
YLITPVHVMSKHTDFSSEIIGYKAI

SEQ ID NO: 16755 - protein, 25 aa, Artificial Sequence
  Description of Artificial Sequence: Synthetic peptide
IFYLITPVHVMSKHTDFSSEIIGYK

SEQ ID NO: 16756 - protein, 25 aa, Artificial Sequence
  Description of Artificial Sequence: Synthetic peptide
AIFYLITPVHVMSKHTDFSSEIIGY

SEQ ID NO: 16757 - protein, 25 aa, Artificial Sequence
  Description of Artificial Sequence: Synthetic peptide
FYLITPVHVMSKHTDFSSEIIGYKA

SEQ ID NO: 16758 - protein, 25 aa, Artificial Sequence
  Description of Artificial Sequence: Synthetic peptide
MLNPNYEDLLIRKSNHNFLVQAGNV

SEQ ID NO: 16759 - protein, 25 aa, Artificial Sequence
  Description of Artificial Sequence: Synthetic peptide
DMLNPNYEDLLIRKSNHNFLVQAGN

SEQ ID NO: 16760 - protein, 25 aa, Artificial Sequence
  Description of Artificial Sequence: Synthetic peptide
SRTLETAQNSVRVLQKAAITILDGI

SEQ ID NO: 16761 - protein, 25 aa, Artificial Sequence
  Description of Artificial Sequence: Synthetic peptide
FSRTLETAQNSVRVLQKAAITILDG

SEQ ID NO: 16762 - protein, 25 aa, Artificial Sequence
  Description of Artificial Sequence: Synthetic peptide
RTLETAQNSVRVLQKAAITILDGIS

SEQ ID NO: 16763 - protein, 25 aa, Artificial Sequence
  Description of Artificial Sequence: Synthetic peptide
TEEVVLKTGDLQPLEQPTSEAVEAP

SEQ ID NO: 16764 - protein, 25 aa, Artificial Sequence
  Description of Artificial Sequence: Synthetic peptide
VLTEEVVLKTGDLQPLEQPTSEAVE

SEQ ID NO: 16765 - protein, 25 aa, Artificial Sequence
  Description of Artificial Sequence: Synthetic peptide
LTEEVVLKTGDLQPLEQPTSEAVEA

SEQ ID NO: 16766 - protein, 25 aa, Artificial Sequence
  Description of Artificial Sequence: Synthetic peptide
EEVVLKTGDLQPLEQPTSEAVEAPL

SEQ ID NO: 16767 - protein, 25 aa, Artificial Sequence
  Description of Artificial Sequence: Synthetic peptide
KVKPTVVVNAANVYLKHGGGVAGAL

SEQ ID NO: 16768 - protein, 25 aa, Artificial Sequence
  Description of Artificial Sequence: Synthetic peptide
AKKVKPTVVVNAANVYLKHGGGVAG

SEQ ID NO: 16769 - protein, 25 aa, Artificial Sequence
  Description of Artificial Sequence: Synthetic peptide
KKVKPTVVVNAANVYLKHGGGVAGA

SEQ ID NO: 16770 - protein, 25 aa, Artificial Sequence
  Description of Artificial Sequence: Synthetic peptide
VKPTVVVNAANVYLKHGGGVAGALN

SEQ ID NO: 16771 - protein, 25 aa, Artificial Sequence
  Description of Artificial Sequence: Synthetic peptide
AMVRMYIFFASFYYVWKSYVHVVDG

SEQ ID NO: 16772 - protein, 25 aa, Artificial Sequence
  Description of Artificial Sequence: Synthetic peptide
AVLDMCASLKELLQNGMNGRTILGS

SEQ ID NO: 16773 - protein, 25 aa, Artificial Sequence
  Description of Artificial Sequence: Synthetic peptide
VVQTIEVNSFSGYLKLTDNVYIKNA

SEQ ID NO: 16774 - protein, 25 aa, Artificial Sequence
  Description of Artificial Sequence: Synthetic peptide
PVVQTIEVNSFSGYLKLTDNVYIKN

SEQ ID NO: 16775 - protein, 25 aa, Artificial Sequence
  Description of Artificial Sequence: Synthetic peptide
NTTKGGRFVLALLSDLQDLKWARFP

SEQ ID NO: 16776 - protein, 25 aa, Artificial Sequence
  Description of Artificial Sequence: Synthetic peptide
YNTTKGGRFVLALLSDLQDLKWARF

SEQ ID NO: 16777 - protein, 25 aa, Artificial Sequence
  Description of Artificial Sequence: Synthetic peptide
YYNTTKGGRFVLALLSDLQDLKWAR

SEQ ID NO: 16778 - protein, 25 aa, Artificial Sequence
  Description of Artificial Sequence: Synthetic peptide
TPPIKDFGGFNFSQILPDPSKPSKR

SEQ ID NO: 16779 - protein, 25 aa, Artificial Sequence
  Description of Artificial Sequence: Synthetic peptide
SASKIITLKKRWQLALSKGVHFVCN

SEQ ID NO: 16780 - protein, 25 aa, Artificial Sequence
  Description of Artificial Sequence: Synthetic peptide
QSASKIITLKKRWQLALSKGVHFVC

SEQ ID NO: 16781 - protein, 25 aa, Artificial Sequence
  Description of Artificial Sequence: Synthetic peptide
EAVMYMGTLSYEQFKKGVQIPCTCG

SEQ ID NO: 16782 - protein, 25 aa, Artificial Sequence
  Description of Artificial Sequence: Synthetic peptide
VEAVMYMGTLSYEQFKKGVQIPCTC

SEQ ID NO: 16783 - protein, 25 aa, Artificial Sequence
  Description of Artificial Sequence: Synthetic peptide
TFTCASEYTGNYQCGHYKHITSKET

SEQ ID NO: 16784 - protein, 25 aa, Artificial Sequence
  Description of Artificial Sequence: Synthetic peptide
YTPSKLIEYTDFATSACVLAAECTI

SEQ ID NO: 16785 - protein, 25 aa, Artificial Sequence
  Description of Artificial Sequence: Synthetic peptide
VGNICYTPSKLIEYTDFATSACVLA

SEQ ID NO: 16786 - protein, 25 aa, Artificial Sequence
  Description of Artificial Sequence: Synthetic peptide
GNICYTPSKLIEYTDFATSACVLAA

SEQ ID NO: 16787 - protein, 25 aa, Artificial Sequence
  Description of Artificial Sequence: Synthetic peptide
GTFTCASEYTGNYQCGHYKHITSKE

SEQ ID NO: 16788 - protein, 25 aa, Artificial Sequence
  Description of Artificial Sequence: Synthetic peptide
FVETVKGLDYKAFKQIVESCGNFKV

SEQ ID NO: 16789 - protein, 25 aa, Artificial Sequence
  Description of Artificial Sequence: Synthetic peptide
AFVETVKGLDYKAFKQIVESCGNFK

SEQ ID NO: 16790 - protein, 25 aa, Artificial Sequence
  Description of Artificial Sequence: Synthetic peptide
VETVKGLDYKAFKQIVESCGNFKVT

SEQ ID NO: 16791 - protein, 25 aa, Artificial Sequence
  Description of Artificial Sequence: Synthetic peptide
LTSQWLTNIFGTVYEKLKPVLDWLE

SEQ ID NO: 16792 - protein, 25 aa, Artificial Sequence
  Description of Artificial Sequence: Synthetic peptide
AVGNICYTPSKLIEYTDFATSACVL

SEQ ID NO: 16793 - protein, 25 aa, Artificial Sequence
  Description of Artificial Sequence: Synthetic peptide
LNNLNRGMVLGSLAATVRLQAGNAT

SEQ ID NO: 16794 - protein, 25 aa, Artificial Sequence
  Description of Artificial Sequence: Synthetic peptide
LNRGMVLGSLAATVRLQAGNATEVP

SEQ ID NO: 16795 - protein, 25 aa, Artificial Sequence
  Description of Artificial Sequence: Synthetic peptide
NLNRGMVLGSLAATVRLQAGNATEV

SEQ ID NO: 16796 - protein, 25 aa, Artificial Sequence
  Description of Artificial Sequence: Synthetic peptide
NRGMVLGSLAATVRLQAGNATEVPA

SEQ ID NO: 16797 - protein, 25 aa, Artificial Sequence
  Description of Artificial Sequence: Synthetic peptide
NNLNRGMVLGSLAATVRLQAGNATE

SEQ ID NO: 16798 - protein, 25 aa, Artificial Sequence
  Description of Artificial Sequence: Synthetic peptide
RCDIKDLPKEITVATSRTLSYYKLG

SEQ ID NO: 16799 - protein, 25 aa, Artificial Sequence
  Description of Artificial Sequence: Synthetic peptide
KLKTLVATAEAELAKNVSLDNVLST

SEQ ID NO: 16800 - protein, 25 aa, Artificial Sequence
  Description of Artificial Sequence: Synthetic peptide
EKLKTLVATAEAELAKNVSLDNVLS

SEQ ID NO: 16801 - protein, 25 aa, Artificial Sequence
  Description of Artificial Sequence: Synthetic peptide
EFSSLPSYAAFATAQEAYEQAVANG

SEQ ID NO: 16802 - protein, 25 aa, Artificial Sequence
  Description of Artificial Sequence: Synthetic peptide
FSSLPSYAAFATAQEAYEQAVANGD

SEQ ID NO: 16803 - protein, 25 aa, Artificial Sequence
  Description of Artificial Sequence: Synthetic peptide
NIIPLTTAAKLMVVIPDYNTYKNTC

SEQ ID NO: 16804 - protein, 25 aa, Artificial Sequence
  Description of Artificial Sequence: Synthetic peptide
LNIIPLTTAAKLMVVIPDYNTYKNT

SEQ ID NO: 16805 - protein, 25 aa, Artificial Sequence
  Description of Artificial Sequence: Synthetic peptide
IIPLTTAAKLMVVIPDYNTYKNTCD

SEQ ID NO: 16806 - protein, 25 aa, Artificial Sequence
  Description of Artificial Sequence: Synthetic peptide
PLNIIPLTTAAKLMVVIPDYNTYKN

SEQ ID NO: 16807 - protein, 25 aa, Artificial Sequence
  Description of Artificial Sequence: Synthetic peptide
NPTTFHLDGEVITFDNLKTLLSLRE

SEQ ID NO: 16808 - protein, 25 aa, Artificial Sequence
  Description of Artificial Sequence: Synthetic peptide
SNPTTFHLDGEVITFDNLKTLLSLR

SEQ ID NO: 16809 - protein, 25 aa, Artificial Sequence
  Description of Artificial Sequence: Synthetic peptide
ITTYPGQGLNGYTVEEAKTVLKKCK

SEQ ID NO: 16810 - protein, 25 aa, Artificial Sequence
  Description of Artificial Sequence: Synthetic peptide
TTYPGQGLNGYTVEEAKTVLKKCKS

SEQ ID NO: 16811 - protein, 25 aa, Artificial Sequence
  Description of Artificial Sequence: Synthetic peptide
LREVRTIKVFTTVDNINLHTQVVDM

SEQ ID NO: 16812 - protein, 25 aa, Artificial Sequence
  Description of Artificial Sequence: Synthetic peptide
FDVVRQCSGVTFQSAVKRTIKGTHH

SEQ ID NO: 16813 - protein, 25 aa, Artificial Sequence
  Description of Artificial Sequence: Synthetic peptide
PFDVVRQCSGVTFQSAVKRTIKGTH

SEQ ID NO: 16814 - protein, 25 aa, Artificial Sequence
  Description of Artificial Sequence: Synthetic peptide
KQDDKKIKACVEEVTTTLEETKFLT

SEQ ID NO: 16815 - protein, 25 aa, Artificial Sequence
  Description of Artificial Sequence: Synthetic peptide
KHITSKETLYCIDGALLTKSSEYKG

SEQ ID NO: 16816 - protein, 25 aa, Artificial Sequence
  Description of Artificial Sequence: Synthetic peptide
HITSKETLYCIDGALLTKSSEYKGP

SEQ ID NO: 16817 - protein, 25 aa, Artificial Sequence
  Description of Artificial Sequence: Synthetic peptide
YKHITSKETLYCIDGALLTKSSEYK

SEQ ID NO: 16818 - protein, 25 aa, Artificial Sequence
  Description of Artificial Sequence: Synthetic peptide
ITSKETLYCIDGALLTKSSEYKGPI

SEQ ID NO: 16819 - protein, 25 aa, Artificial Sequence
  Description of Artificial Sequence: Synthetic peptide
VYCPRHVICTSEDMLNPNYEDLLIR

SEQ ID NO: 16820 - protein, 25 aa, Artificial Sequence
  Description of Artificial Sequence: Synthetic peptide
CPRHVICTSEDMLNPNYEDLLIRKS

SEQ ID NO: 16821 - protein, 25 aa, Artificial Sequence
  Description of Artificial Sequence: Synthetic peptide
YCPRHVICTSEDMLNPNYEDLLIRK

SEQ ID NO: 16822 - protein, 25 aa, Artificial Sequence
  Description of Artificial Sequence: Synthetic peptide
KTLLSLREVRTIKVFTTVDNINLHT

SEQ ID NO: 16823 - protein, 25 aa, Artificial Sequence
  Description of Artificial Sequence: Synthetic peptide
IWNVKDFMSLSEQLRKQIRSAAKKN

SEQ ID NO: 16824 - protein, 25 aa, Artificial Sequence
  Description of Artificial Sequence: Synthetic peptide
NVKDFMSLSEQLRKQIRSAAKKNNL

SEQ ID NO: 16825 - protein, 25 aa, Artificial Sequence
  Description of Artificial Sequence: Synthetic peptide
WNVKDFMSLSEQLRKQIRSAAKKNN

SEQ ID NO: 16826 - protein, 25 aa, Artificial Sequence
  Description of Artificial Sequence: Synthetic peptide
HFLPRVFSAVGNICYTPSKLIEYTD

SEQ ID NO: 16827 - protein, 25 aa, Artificial Sequence
  Description of Artificial Sequence: Synthetic peptide
FLHFLPRVFSAVGNICYTPSKLIEY

SEQ ID NO: 16828 - protein, 25 aa, Artificial Sequence
  Description of Artificial Sequence: Synthetic peptide
LHFLPRVFSAVGNICYTPSKLIEYT

SEQ ID NO: 16829 - protein, 25 aa, Artificial Sequence
  Description of Artificial Sequence: Synthetic peptide
LLSLREVRTIKVFTTVDNINLHTQV

SEQ ID NO: 16830 - protein, 25 aa, Artificial Sequence
  Description of Artificial Sequence: Synthetic peptide
FLPRVFSAVGNICYTPSKLIEYTDF

SEQ ID NO: 16831 - protein, 25 aa, Artificial Sequence
  Description of Artificial Sequence: Synthetic peptide
LPRVFSAVGNICYTPSKLIEYTDFA

SEQ ID NO: 16832 - protein, 25 aa, Artificial Sequence
  Description of Artificial Sequence: Synthetic peptide
QVESDDYIATNGPLKVGGSCVLSGH

SEQ ID NO: 16833 - protein, 25 aa, Artificial Sequence
  Description of Artificial Sequence: Synthetic peptide
NAMQVESDDYIATNGPLKVGGSCVL

SEQ ID NO: 16834 - protein, 25 aa, Artificial Sequence
  Description of Artificial Sequence: Synthetic peptide
NNAMQVESDDYIATNGPLKVGGSCV

SEQ ID NO: 16835 - protein, 25 aa, Artificial Sequence
  Description of Artificial Sequence: Synthetic peptide
AMQVESDDYIATNGPLKVGGSCVLS

SEQ ID NO: 16836 - protein, 25 aa, Artificial Sequence
  Description of Artificial Sequence: Synthetic peptide
MQVESDDYIATNGPLKVGGSCVLSG

SEQ ID NO: 16837 - protein, 25 aa, Artificial Sequence
  Description of Artificial Sequence: Synthetic peptide
QVAKSHNIALIWNVKDFMSLSEQLR

SEQ ID NO: 16838 - protein, 25 aa, Artificial Sequence
  Description of Artificial Sequence: Synthetic peptide
DILLAKDTTEAFEKMVSLLSVLLSM

SEQ ID NO: 16839 - protein, 25 aa, Artificial Sequence
  Description of Artificial Sequence: Synthetic peptide
SLPSYAAFATAQEAYEQAVANGDSE

SEQ ID NO: 16840 - protein, 25 aa, Artificial Sequence
  Description of Artificial Sequence: Synthetic peptide
CGHYKHITSKETLYCIDGALLTKSS

SEQ ID NO: 16841 - protein, 25 aa, Artificial Sequence
  Description of Artificial Sequence: Synthetic peptide
DNYITTYPGQGLNGYTVEEAKTVLK

SEQ ID NO: 16842 - protein, 25 aa, Artificial Sequence
  Description of Artificial Sequence: Synthetic peptide
RKVPTDNYITTYPGQGLNGYTVEEA

SEQ ID NO: 16843 - protein, 25 aa, Artificial Sequence
  Description of Artificial Sequence: Synthetic peptide
ALRKVPTDNYITTYPGQGLNGYTVE

SEQ ID NO: 16844 - protein, 25 aa, Artificial Sequence
  Description of Artificial Sequence: Synthetic peptide
LRKVPTDNYITTYPGQGLNGYTVEE

SEQ ID NO: 16845 - protein, 25 aa, Artificial Sequence
  Description of Artificial Sequence: Synthetic peptide
KALRKVPTDNYITTYPGQGLNGYTV

SEQ ID NO: 16846 - protein, 25 aa, Artificial Sequence
  Description of Artificial Sequence: Synthetic peptide
SLDNVLSTFISAARQGFVDSDVETK

SEQ ID NO: 16847 - protein, 25 aa, Artificial Sequence
  Description of Artificial Sequence: Synthetic peptide
LDNVLSTFISAARQGFVDSDVETKD

SEQ ID NO: 16848 - protein, 25 aa, Artificial Sequence
  Description of Artificial Sequence: Synthetic peptide
TPEEHFIETISLAGSYKDWSYSGQS

SEQ ID NO: 16849 - protein, 25 aa, Artificial Sequence
  Description of Artificial Sequence: Synthetic peptide
GQGLNGYTVEEAKTVLKKCKSAFYI

SEQ ID NO: 16850 - protein, 25 aa, Artificial Sequence
  Description of Artificial Sequence: Synthetic peptide
QGLNGYTVEEAKTVLKKCKSAFYIL

SEQ ID NO: 16851 - protein, 25 aa, Artificial Sequence
  Description of Artificial Sequence: Synthetic peptide
YASAVVLLILMTARTVYDDGARRVW

SEQ ID NO: 16852 - protein, 25 aa, Artificial Sequence
  Description of Artificial Sequence: Synthetic peptide
VMYASAVVLLILMTARTVYDDGARR

SEQ ID NO: 16853 - protein, 25 aa, Artificial Sequence
  Description of Artificial Sequence: Synthetic peptide
MYASAVVLLILMTARTVYDDGARRV

SEQ ID NO: 16854 - protein, 25 aa, Artificial Sequence
  Description of Artificial Sequence: Synthetic peptide
VVSTTTNIVTRCLNRVCTNYMPYFF

SEQ ID NO: 16855 - protein, 25 aa, Artificial Sequence
  Description of Artificial Sequence: Synthetic peptide
KVVSTTTNIVTRCLNRVCTNYMPYF

SEQ ID NO: 16856 - protein, 25 aa, Artificial Sequence
  Description of Artificial Sequence: Synthetic peptide
VSTTTNIVTRCLNRVCTNYMPYFFT

SEQ ID NO: 16857 - protein, 25 aa, Artificial Sequence
  Description of Artificial Sequence: Synthetic peptide
TDPSFLGRYMSALNHTKKWKYPQVN

SEQ ID NO: 16858 - protein, 25 aa, Artificial Sequence
  Description of Artificial Sequence: Synthetic peptide
TTDPSFLGRYMSALNHTKKWKYPQV

SEQ ID NO: 16859 - protein, 25 aa, Artificial Sequence
  Description of Artificial Sequence: Synthetic peptide
HTTDPSFLGRYMSALNHTKKWKYPQ

SEQ ID NO: 16860 - protein, 25 aa, Artificial Sequence
  Description of Artificial Sequence: Synthetic peptide
AYKDYLASGGQPITNCVKMLCTHTG

SEQ ID NO: 16861 - protein, 25 aa, Artificial Sequence
  Description of Artificial Sequence: Synthetic peptide
LTLGVYDYLVSTQEFRYMNSQGLLP

SEQ ID NO: 16862 - protein, 25 aa, Artificial Sequence
  Description of Artificial Sequence: Synthetic peptide
KLEKMADQAMTQMYKQARSEDKRAK

SEQ ID NO: 16863 - protein, 25 aa, Artificial Sequence
  Description of Artificial Sequence: Synthetic peptide
ECPNFVFPLNSIIKTIQPRVEKKKL

SEQ ID NO: 16864 - protein, 25 aa, Artificial Sequence
  Description of Artificial Sequence: Synthetic peptide
NEFACVVADAVIKTLQPVSELLTPL

SEQ ID NO: 16865 - protein, 25 aa, Artificial Sequence
  Description of Artificial Sequence: Synthetic peptide
KFVCDNIKFADDLNQLTGYKKPASR

SEQ ID NO: 16866 - protein, 25 aa, Artificial Sequence
  Description of Artificial Sequence: Synthetic peptide
VCDNIKFADDLNQLTGYKKPASREL

SEQ ID NO: 16867 - protein, 25 aa, Artificial Sequence
  Description of Artificial Sequence: Synthetic peptide
FVCDNIKFADDLNQLTGYKKPASRE

SEQ ID NO: 16868 - protein, 25 aa, Artificial Sequence
  Description of Artificial Sequence: Synthetic peptide
EQRKQDDKKIKACVEEVTTTLEETK

SEQ ID NO: 16869 - protein, 25 aa, Artificial Sequence
  Description of Artificial Sequence: Synthetic peptide
QRKQDDKKIKACVEEVTTTLEETKF

SEQ ID NO: 16870 - protein, 25 aa, Artificial Sequence
  Description of Artificial Sequence: Synthetic peptide
TDNYITTYPGQGLNGYTVEEAKTVL

SEQ ID NO: 16871 - protein, 25 aa, Artificial Sequence
  Description of Artificial Sequence: Synthetic peptide
MDGSIIQFPNTYLEGSVRVVTTFDS

SEQ ID NO: 16872 - protein, 25 aa, Artificial Sequence
  Description of Artificial Sequence: Synthetic peptide
LMDGSIIQFPNTYLEGSVRVVTTFD

SEQ ID NO: 16873 - protein, 25 aa, Artificial Sequence
  Description of Artificial Sequence: Synthetic peptide
DNIKFADDLNQLTGYKKPASRELKV

SEQ ID NO: 16874 - protein, 25 aa, Artificial Sequence
  Description of Artificial Sequence: Synthetic peptide
VVLLILMTARTVYDDGARRVWTLMN

SEQ ID NO: 16875 - protein, 25 aa, Artificial Sequence
  Description of Artificial Sequence: Synthetic peptide
LNGYTVEEAKTVLKKCKSAFYILPS

SEQ ID NO: 16876 - protein, 25 aa, Artificial Sequence
  Description of Artificial Sequence: Synthetic peptide
GHYKHITSKETLYCIDGALLTKSSE

SEQ ID NO: 16877 - protein, 25 aa, Artificial Sequence
  Description of Artificial Sequence: Synthetic peptide
KNVSLDNVLSTFISAARQGFVDSDV

SEQ ID NO: 16878 - protein, 25 aa, Artificial Sequence
  Description of Artificial Sequence: Synthetic peptide
VSLDNVLSTFISAARQGFVDSDVET

SEQ ID NO: 16879 - protein, 25 aa, Artificial Sequence
  Description of Artificial Sequence: Synthetic peptide
AKNVSLDNVLSTFISAARQGFVDSD

SEQ ID NO: 16880 - protein, 25 aa, Artificial Sequence
  Description of Artificial Sequence: Synthetic peptide
NVSLDNVLSTFISAARQGFVDSDVE

SEQ ID NO: 16881 - protein, 25 aa, Artificial Sequence
  Description of Artificial Sequence: Synthetic peptide
FTPLVPFWITIAYIICISTKHFYWF

SEQ ID NO: 16882 - protein, 25 aa, Artificial Sequence
  Description of Artificial Sequence: Synthetic peptide
MFTPLVPFWITIAYIICISTKHFYW

SEQ ID NO: 16883 - protein, 25 aa, Artificial Sequence
  Description of Artificial Sequence: Synthetic peptide
MPLKAPKEIIFLEGETLPTEVLTEE

SEQ ID NO: 16884 - protein, 25 aa, Artificial Sequence
  Description of Artificial Sequence: Synthetic peptide
LMPLKAPKEIIFLEGETLPTEVLTE

SEQ ID NO: 16885 - protein, 25 aa, Artificial Sequence
  Description of Artificial Sequence: Synthetic peptide
LKAPKEIIFLEGETLPTEVLTEEVV

SEQ ID NO: 16886 - protein, 25 aa, Artificial Sequence
  Description of Artificial Sequence: Synthetic peptide
PLKAPKEIIFLEGETLPTEVLTEEV

SEQ ID NO: 16887 - protein, 25 aa, Artificial Sequence
  Description of Artificial Sequence: Synthetic peptide
LLMPLKAPKEIIFLEGETLPTEVLT

SEQ ID NO: 16888 - protein, 25 aa, Artificial Sequence
  Description of Artificial Sequence: Synthetic peptide
NKVVSTTTNIVTRCLNRVCTNYMPY

SEQ ID NO: 16889 - protein, 25 aa, Artificial Sequence
  Description of Artificial Sequence: Synthetic peptide
SHEGKTFYVLPNDDTLRVEAFEYYH

SEQ ID NO: 16890 - protein, 25 aa, Artificial Sequence
  Description of Artificial Sequence: Synthetic peptide
NSHEGKTFYVLPNDDTLRVEAFEYY

SEQ ID NO: 16891 - protein, 25 aa, Artificial Sequence
  Description of Artificial Sequence: Synthetic peptide
VAYESLRPDTRYVLMDGSIIQFPNT

SEQ ID NO: 16892 - protein, 25 aa, Artificial Sequence
  Description of Artificial Sequence: Synthetic peptide
ATLQAIASEFSSLPSYAAFATAQEA

SEQ ID NO: 16893 - protein, 25 aa, Artificial Sequence
  Description of Artificial Sequence: Synthetic peptide
NLDSCKRVLNVVCKTCGQQQTTLKG

SEQ ID NO: 16894 - protein, 25 aa, Artificial Sequence
  Description of Artificial Sequence: Synthetic peptide
QHANLDSCKRVLNVVCKTCGQQQTT

SEQ ID NO: 16895 - protein, 25 aa, Artificial Sequence
  Description of Artificial Sequence: Synthetic peptide
LDSCKRVLNVVCKTCGQQQTTLKGV

SEQ ID NO: 16896 - protein, 25 aa, Artificial Sequence
  Description of Artificial Sequence: Synthetic peptide
ANLDSCKRVLNVVCKTCGQQQTTLK

SEQ ID NO: 16897 - protein, 25 aa, Artificial Sequence
  Description of Artificial Sequence: Synthetic peptide
HANLDSCKRVLNVVCKTCGQQQTTL

SEQ ID NO: 16898 - protein, 25 aa, Artificial Sequence
  Description of Artificial Sequence: Synthetic peptide
LNPNYEDLLIRKSNHNFLVQAGNVQ

SEQ ID NO: 16899 - protein, 25 aa, Artificial Sequence
  Description of Artificial Sequence: Synthetic peptide
CAKEIKESVQTFFKLVNKFLALCAD

SEQ ID NO: 16900 - protein, 25 aa, Artificial Sequence
  Description of Artificial Sequence: Synthetic peptide
DTEKYCALAPNMMVTNNTFTLKGGA

SEQ ID NO: 16901 - protein, 25 aa, Artificial Sequence
  Description of Artificial Sequence: Synthetic peptide
LTPVVQTIEVNSFSGYLKLTDNVYI

SEQ ID NO: 16902 - protein, 25 aa, Artificial Sequence
  Description of Artificial Sequence: Synthetic peptide
ELTPVVQTIEVNSFSGYLKLTDNVY

SEQ ID NO: 16903 - protein, 25 aa, Artificial Sequence
  Description of Artificial Sequence: Synthetic peptide
VYDDGARRVWTLMNVLTLVYKVYYG

SEQ ID NO: 16904 - protein, 25 aa, Artificial Sequence
  Description of Artificial Sequence: Synthetic peptide
YDDGARRVWTLMNVLTLVYKVYYGN

SEQ ID NO: 16905 - protein, 25 aa, Artificial Sequence
  Description of Artificial Sequence: Synthetic peptide
DDGARRVWTLMNVLTLVYKVYYGNA

SEQ ID NO: 16906 - protein, 25 aa, Artificial Sequence
  Description of Artificial Sequence: Synthetic peptide
PNTYLEGSVRVVTTFDSEYCRHGTC

SEQ ID NO: 16907 - protein, 25 aa, Artificial Sequence
  Description of Artificial Sequence: Synthetic peptide
TYLEGSVRVVTTFDSEYCRHGTCER

SEQ ID NO: 16908 - protein, 25 aa, Artificial Sequence
  Description of Artificial Sequence: Synthetic peptide
LEGSVRVVTTFDSEYCRHGTCERSE

SEQ ID NO: 16909 - protein, 25 aa, Artificial Sequence
  Description of Artificial Sequence: Synthetic peptide
NTYLEGSVRVVTTFDSEYCRHGTCE

SEQ ID NO: 16910 - protein, 25 aa, Artificial Sequence
  Description of Artificial Sequence: Synthetic peptide
YLEGSVRVVTTFDSEYCRHGTCERS

SEQ ID NO: 16911 - protein, 25 aa, Artificial Sequence
  Description of Artificial Sequence: Synthetic peptide
DYLASGGQPITNCVKMLCTHTGTGQ

SEQ ID NO: 16912 - protein, 25 aa, Artificial Sequence
  Description of Artificial Sequence: Synthetic peptide
VYLAVFDKNLYDKLVSSFLEMKSEK

SEQ ID NO: 16913 - protein, 25 aa, Artificial Sequence
  Description of Artificial Sequence: Synthetic peptide
IIQFPNTYLEGSVRVVTTFDSEYCR

SEQ ID NO: 16914 - protein, 25 aa, Artificial Sequence
  Description of Artificial Sequence: Synthetic peptide
QEGVLTAVVIPTKKAGGTTEMLAKA

SEQ ID NO: 16915 - protein, 25 aa, Artificial Sequence
  Description of Artificial Sequence: Synthetic peptide
VQEGVLTAVVIPTKKAGGTTEMLAK

SEQ ID NO: 16916 - protein, 25 aa, Artificial Sequence
  Description of Artificial Sequence: Synthetic peptide
VVQEGVLTAVVIPTKKAGGTTEMLA

SEQ ID NO: 16917 - protein, 25 aa, Artificial Sequence
  Description of Artificial Sequence: Synthetic peptide
SGGQPITNCVKMLCTHTGTGQAITV

SEQ ID NO: 16918 - protein, 25 aa, Artificial Sequence
  Description of Artificial Sequence: Synthetic peptide
EMELTPVVQTIEVNSFSGYLKLTDN

SEQ ID NO: 16919 - protein, 25 aa, Artificial Sequence
  Description of Artificial Sequence: Synthetic peptide
NGYTVEEAKTVLKKCKSAFYILPSI

SEQ ID NO: 16920 - protein, 25 aa, Artificial Sequence
  Description of Artificial Sequence: Synthetic peptide
FFASFYYVWKSYVHVVDGCNSSTCM

SEQ ID NO: 16921 - protein, 25 aa, Artificial Sequence
  Description of Artificial Sequence: Synthetic peptide
FASFYYVWKSYVHVVDGCNSSTCMM

SEQ ID NO: 16922 - protein, 25 aa, Artificial Sequence
  Description of Artificial Sequence: Synthetic peptide
MYIFFASFYYVWKSYVHVVDGCNSS

SEQ ID NO: 16923 - protein, 25 aa, Artificial Sequence
  Description of Artificial Sequence: Synthetic peptide
IFFASFYYVWKSYVHVVDGCNSSTC

SEQ ID NO: 16924 - protein, 25 aa, Artificial Sequence
  Description of Artificial Sequence: Synthetic peptide
YIFFASFYYVWKSYVHVVDGCNSST

SEQ ID NO: 16925 - protein, 25 aa, Artificial Sequence
  Description of Artificial Sequence: Synthetic peptide
TVEEAKTVLKKCKSAFYILPSIISN

SEQ ID NO: 16926 - protein, 25 aa, Artificial Sequence
  Description of Artificial Sequence: Synthetic peptide
MVRMYIFFASFYYVWKSYVHVVDGC

SEQ ID NO: 16927 - protein, 25 aa, Artificial Sequence
  Description of Artificial Sequence: Synthetic peptide
IAYIICISTKHFYWFFSNYLKRRVV

SEQ ID NO: 16928 - protein, 25 aa, Artificial Sequence
  Description of Artificial Sequence: Synthetic peptide
DTTEAFEKMVSLLSVLLSMQGAVDI

SEQ ID NO: 16929 - protein, 25 aa, Artificial Sequence
  Description of Artificial Sequence: Synthetic peptide
TSAMQTMLFTMLRKLDNDALNNIIN

SEQ ID NO: 16930 - protein, 25 aa, Artificial Sequence
  Description of Artificial Sequence: Synthetic peptide
KSVGKFCLEASFNYLKSPNFSKLIN

SEQ ID NO: 16931 - protein, 25 aa, Artificial Sequence
  Description of Artificial Sequence: Synthetic peptide
VKSVGKFCLEASFNYLKSPNFSKLI

SEQ ID NO: 16932 - protein, 25 aa, Artificial Sequence
  Description of Artificial Sequence: Synthetic peptide
TVKSVGKFCLEASFNYLKSPNFSKL

SEQ ID NO: 16933 - protein, 25 aa, Artificial Sequence
  Description of Artificial Sequence: Synthetic peptide
NTVKSVGKFCLEASFNYLKSPNFSK

SEQ ID NO: 16934 - protein, 25 aa, Artificial Sequence
  Description of Artificial Sequence: Synthetic peptide
LMLLEIKDTEKYCALAPNMMVTNNT

SEQ ID NO: 16935 - protein, 25 aa, Artificial Sequence
  Description of Artificial Sequence: Synthetic peptide
MLLEIKDTEKYCALAPNMMVTNNTF

SEQ ID NO: 16936 - protein, 25 aa, Artificial Sequence
  Description of Artificial Sequence: Synthetic peptide
LITPVHVMSKHTDFSSEIIGYKAID

SEQ ID NO: 16937 - protein, 25 aa, Artificial Sequence
  Description of Artificial Sequence: Synthetic peptide
DQAISMWALIISVTSNYSGVVTTVM

SEQ ID NO: 16938 - protein, 25 aa, Artificial Sequence
  Description of Artificial Sequence: Synthetic peptide
AISMWALIISVTSNYSGVVTTVMFL

SEQ ID NO: 16939 - protein, 25 aa, Artificial Sequence
  Description of Artificial Sequence: Synthetic peptide
SMWALIISVTSNYSGVVTTVMFLAR

SEQ ID NO: 16940 - protein, 25 aa, Artificial Sequence
  Description of Artificial Sequence: Synthetic peptide
ISMWALIISVTSNYSGVVTTVMFLA

SEQ ID NO: 16941 - protein, 25 aa, Artificial Sequence
  Description of Artificial Sequence: Synthetic peptide
QAISMWALIISVTSNYSGVVTTVMF

SEQ ID NO: 16942 - protein, 25 aa, Artificial Sequence
  Description of Artificial Sequence: Synthetic peptide
TPVHVMSKHTDFSSEIIGYKAIDGG

SEQ ID NO: 16943 - protein, 25 aa, Artificial Sequence
  Description of Artificial Sequence: Synthetic peptide
TKGGRFVLALLSDLQDLKWARFPKS

SEQ ID NO: 16944 - protein, 25 aa, Artificial Sequence
  Description of Artificial Sequence: Synthetic peptide
TTKGGRFVLALLSDLQDLKWARFPK

SEQ ID NO: 16945 - protein, 25 aa, Artificial Sequence
  Description of Artificial Sequence: Synthetic peptide
PKCDRAMPNMLRIMASLVLARKHTT

SEQ ID NO: 16946 - protein, 25 aa, Artificial Sequence
  Description of Artificial Sequence: Synthetic peptide
YPKCDRAMPNMLRIMASLVLARKHT

SEQ ID NO: 16947 - protein, 25 aa, Artificial Sequence
  Description of Artificial Sequence: Synthetic peptide
DIKDLPKEITVATSRTLSYYKLGAS

SEQ ID NO: 16948 - protein, 25 aa, Artificial Sequence
  Description of Artificial Sequence: Synthetic peptide
IKDLPKEITVATSRTLSYYKLGASQ

SEQ ID NO: 16949 - protein, 25 aa, Artificial Sequence
  Description of Artificial Sequence: Synthetic peptide
CDIKDLPKEITVATSRTLSYYKLGA

SEQ ID NO: 16950 - protein, 25 aa, Artificial Sequence
  Description of Artificial Sequence: Synthetic peptide
AVFQSASKIITLKKRWQLALSKGVH

SEQ ID NO: 16951 - protein, 25 aa, Artificial Sequence
  Description of Artificial Sequence: Synthetic peptide
FQSASKIITLKKRWQLALSKGVHFV

SEQ ID NO: 16952 - protein, 25 aa, Artificial Sequence
  Description of Artificial Sequence: Synthetic peptide
VFQSASKIITLKKRWQLALSKGVHF

SEQ ID NO: 16953 - protein, 25 aa, Artificial Sequence
  Description of Artificial Sequence: Synthetic peptide
CYTPSKLIEYTDFATSACVLAAECT

SEQ ID NO: 16954 - protein, 25 aa, Artificial Sequence
  Description of Artificial Sequence: Synthetic peptide
SAFVETVKGLDYKAFKQIVESCGNF

SEQ ID NO: 16955 - protein, 25 aa, Artificial Sequence
  Description of Artificial Sequence: Synthetic peptide
RAMPNMLRIMASLVLARKHTTCCSL

SEQ ID NO: 16956 - protein, 25 aa, Artificial Sequence
  Description of Artificial Sequence: Synthetic peptide
CDRAMPNMLRIMASLVLARKHTTCC

SEQ ID NO: 16957 - protein, 25 aa, Artificial Sequence
  Description of Artificial Sequence: Synthetic peptide
DRAMPNMLRIMASLVLARKHTTCCS

SEQ ID NO: 16958 - protein, 25 aa, Artificial Sequence
  Description of Artificial Sequence: Synthetic peptide
KCDRAMPNMLRIMASLVLARKHTTC

SEQ ID NO: 16959 - protein, 25 aa, Artificial Sequence
  Description of Artificial Sequence: Synthetic peptide
YPGQGLNGYTVEEAKTVLKKCKSAF

SEQ ID NO: 16960 - protein, 25 aa, Artificial Sequence
  Description of Artificial Sequence: Synthetic peptide
TYPGQGLNGYTVEEAKTVLKKCKSA

SEQ ID NO: 16961 - protein, 25 aa, Artificial Sequence
  Description of Artificial Sequence: Synthetic peptide
KDLPKEITVATSRTLSYYKLGASQR

SEQ ID NO: 16962 - protein, 25 aa, Artificial Sequence
  Description of Artificial Sequence: Synthetic peptide
EVGFVVPGLPGTILRTTNGDFLHFL

SEQ ID NO: 16963 - protein, 25 aa, Artificial Sequence
  Description of Artificial Sequence: Synthetic peptide
WEIVKFISTCACEIVGGQIVTCAKE

SEQ ID NO: 16964 - protein, 25 aa, Artificial Sequence
  Description of Artificial Sequence: Synthetic peptide
TVLSFCAFAVDAAKAYKDYLASGGQ

SEQ ID NO: 16965 - protein, 25 aa, Artificial Sequence
  Description of Artificial Sequence: Synthetic peptide
SLREVRTIKVFTTVDNINLHTQVVD

SEQ ID NO: 16966 - protein, 25 aa, Artificial Sequence
  Description of Artificial Sequence: Synthetic peptide
STFNVPMEKLKTLVATAEAELAKNV

SEQ ID NO: 16967 - protein, 25 aa, Artificial Sequence
  Description of Artificial Sequence: Synthetic peptide
SSTFNVPMEKLKTLVATAEAELAKN

SEQ ID NO: 16968 - protein, 25 aa, Artificial Sequence
  Description of Artificial Sequence: Synthetic peptide
SEFSSLPSYAAFATAQEAYEQAVAN

SEQ ID NO: 16969 - protein, 25 aa, Artificial Sequence
  Description of Artificial Sequence: Synthetic peptide
ASEFSSLPSYAAFATAQEAYEQAVA

SEQ ID NO: 16970 - protein, 25 aa, Artificial Sequence
  Description of Artificial Sequence: Synthetic peptide
VPLNIIPLTTAAKLMVVIPDYNTYK

SEQ ID NO: 16971 - protein, 25 aa, Artificial Sequence
  Description of Artificial Sequence: Synthetic peptide
LKTLVATAEAELAKNVSLDNVLSTF

SEQ ID NO: 16972 - protein, 25 aa, Artificial Sequence
  Description of Artificial Sequence: Synthetic peptide
PMEKLKTLVATAEAELAKNVSLDNV

SEQ ID NO: 16973 - protein, 25 aa, Artificial Sequence
  Description of Artificial Sequence: Synthetic peptide
NVPMEKLKTLVATAEAELAKNVSLD

SEQ ID NO: 16974 - protein, 25 aa, Artificial Sequence
  Description of Artificial Sequence: Synthetic peptide
MEKLKTLVATAEAELAKNVSLDNVL

SEQ ID NO: 16975 - protein, 25 aa, Artificial Sequence
  Description of Artificial Sequence: Synthetic peptide
VPMEKLKTLVATAEAELAKNVSLDN

SEQ ID NO: 16976 - protein, 25 aa, Artificial Sequence
  Description of Artificial Sequence: Synthetic peptide
RAKVTSAMQTMLFTMLRKLDNDALN

SEQ ID NO: 16977 - protein, 25 aa, Artificial Sequence
  Description of Artificial Sequence: Synthetic peptide
AKVTSAMQTMLFTMLRKLDNDALNN

SEQ ID NO: 16978 - protein, 25 aa, Artificial Sequence
  Description of Artificial Sequence: Synthetic peptide
KVTSAMQTMLFTMLRKLDNDALNNI

SEQ ID NO: 16979 - protein, 25 aa, Artificial Sequence
  Description of Artificial Sequence: Synthetic peptide
VTSAMQTMLFTMLRKLDNDALNNII

SEQ ID NO: 16980 - protein, 25 aa, Artificial Sequence
  Description of Artificial Sequence: Synthetic peptide
SSLPSYAAFATAQEAYEQAVANGDS

SEQ ID NO: 16981 - protein, 25 aa, Artificial Sequence
  Description of Artificial Sequence: Synthetic peptide
LIWNVKDFMSLSEQLRKQIRSAAKK

SEQ ID NO: 16982 - protein, 25 aa, Artificial Sequence
  Description of Artificial Sequence: Synthetic peptide
VGFVVPGLPGTILRTTNGDFLHFLP

SEQ ID NO: 16983 - protein, 25 aa, Artificial Sequence
  Description of Artificial Sequence: Synthetic peptide
TPFDVVRQCSGVTFQSAVKRTIKGT

SEQ ID NO: 16984 - protein, 25 aa, Artificial Sequence
  Description of Artificial Sequence: Synthetic peptide
GECPNFVFPLNSIIKTIQPRVEKKK

SEQ ID NO: 16985 - protein, 25 aa, Artificial Sequence
  Description of Artificial Sequence: Synthetic peptide
DAAKAYKDYLASGGQPITNCVKMLC

SEQ ID NO: 16986 - protein, 25 aa, Artificial Sequence
  Description of Artificial Sequence: Synthetic peptide
VVYCPRHVICTSEDMLNPNYEDLLI

SEQ ID NO: 16987 - protein, 25 aa, Artificial Sequence
  Description of Artificial Sequence: Synthetic peptide
DVVYCPRHVICTSEDMLNPNYEDLL

SEQ ID NO: 16988 - protein, 25 aa, Artificial Sequence
  Description of Artificial Sequence: Synthetic peptide
RKQDDKKIKACVEEVTTTLEETKFL

SEQ ID NO: 16989 - protein, 25 aa, Artificial Sequence
  Description of Artificial Sequence: Synthetic peptide
DFLHFLPRVFSAVGNICYTPSKLIE

SEQ ID NO: 16990 - protein, 25 aa, Artificial Sequence
  Description of Artificial Sequence: Synthetic peptide
LSLREVRTIKVFTTVDNINLHTQVV

SEQ ID NO: 16991 - protein, 25 aa, Artificial Sequence
  Description of Artificial Sequence: Synthetic peptide
QTFFKLVNKFLALCADSIIIGGAKL

SEQ ID NO: 16992 - protein, 25 aa, Artificial Sequence
  Description of Artificial Sequence: Synthetic peptide
RPDTRYVLMDGSIIQFPNTYLEGSV

SEQ ID NO: 16993 - protein, 25 aa, Artificial Sequence
  Description of Artificial Sequence: Synthetic peptide
ASAVVLLILMTARTVYDDGARRVWT

SEQ ID NO: 16994 - protein, 25 aa, Artificial Sequence
  Description of Artificial Sequence: Synthetic peptide
SAVVLLILMTARTVYDDGARRVWTL

SEQ ID NO: 16995 - protein, 25 aa, Artificial Sequence
  Description of Artificial Sequence: Synthetic peptide
AVVLLILMTARTVYDDGARRVWTLM

SEQ ID NO: 16996 - protein, 25 aa, Artificial Sequence
  Description of Artificial Sequence: Synthetic peptide
LAKNVSLDNVLSTFISAARQGFVDS

SEQ ID NO: 16997 - protein, 25 aa, Artificial Sequence
  Description of Artificial Sequence: Synthetic peptide
FDNLKTLLSLREVRTIKVFTTVDNI

SEQ ID NO: 16998 - protein, 25 aa, Artificial Sequence
  Description of Artificial Sequence: Synthetic peptide
TFDNLKTLLSLREVRTIKVFTTVDN

SEQ ID NO: 16999 - protein, 25 aa, Artificial Sequence
  Description of Artificial Sequence: Synthetic peptide
NPNYEDLLIRKSNHNFLVQAGNVQL

SEQ ID NO: 17000 - protein, 25 aa, Artificial Sequence
  Description of Artificial Sequence: Synthetic peptide
GLPGTILRTTNGDFLHFLPRVFSAV

SEQ ID NO: 17001 - protein, 25 aa, Artificial Sequence
  Description of Artificial Sequence: Synthetic peptide
ETSNSFDVLKSEDAQGMDNLACEDL

SEQ ID NO: 17002 - protein, 25 aa, Artificial Sequence
  Description of Artificial Sequence: Synthetic peptide
GEVITFDNLKTLLSLREVRTIKVFT

SEQ ID NO: 17003 - protein, 25 aa, Artificial Sequence
  Description of Artificial Sequence: Synthetic peptide
PTDNYITTYPGQGLNGYTVEEAKTV

SEQ ID NO: 17004 - protein, 25 aa, Artificial Sequence
  Description of Artificial Sequence: Synthetic peptide
SVGKFCLEASFNYLKSPNFSKLINI

SEQ ID NO: 17005 - protein, 25 aa, Artificial Sequence
  Description of Artificial Sequence: Synthetic peptide
VGKFCLEASFNYLKSPNFSKLINII

SEQ ID NO: 17006 - protein, 25 aa, Artificial Sequence
  Description of Artificial Sequence: Synthetic peptide
IQFPNTYLEGSVRVVTTFDSEYCRH

SEQ ID NO: 17007 - protein, 25 aa, Artificial Sequence
  Description of Artificial Sequence: Synthetic peptide
QFPNTYLEGSVRVVTTFDSEYCRHG

SEQ ID NO: 17008 - protein, 25 aa, Artificial Sequence
  Description of Artificial Sequence: Synthetic peptide
FPNTYLEGSVRVVTTFDSEYCRHGT

SEQ ID NO: 17009 - protein, 25 aa, Artificial Sequence
  Description of Artificial Sequence: Synthetic peptide
TGLLMPLKAPKEIIFLEGETLPTEV

SEQ ID NO: 17010 - protein, 25 aa, Artificial Sequence
  Description of Artificial Sequence: Synthetic peptide
GLLMPLKAPKEIIFLEGETLPTEVL

SEQ ID NO: 17011 - protein, 25 aa, Artificial Sequence
  Description of Artificial Sequence: Synthetic peptide
EVITFDNLKTLLSLREVRTIKVFTT

SEQ ID NO: 17012 - protein, 25 aa, Artificial Sequence
  Description of Artificial Sequence: Synthetic peptide
VITFDNLKTLLSLREVRTIKVFTTV

SEQ ID NO: 17013 - protein, 25 aa, Artificial Sequence
  Description of Artificial Sequence: Synthetic peptide
ITFDNLKTLLSLREVRTIKVFTTVD

SEQ ID NO: 17014 - protein, 25 aa, Artificial Sequence
  Description of Artificial Sequence: Synthetic peptide
HNSHEGKTFYVLPNDDTLRVEAFEY

SEQ ID NO: 17015 - protein, 25 aa, Artificial Sequence
  Description of Artificial Sequence: Synthetic peptide
RSEKSYELQTPFEIKLAKKFDTFNG

SEQ ID NO: 17016 - protein, 25 aa, Artificial Sequence
  Description of Artificial Sequence: Synthetic peptide
GDSEVVLKKLKKSLNVAKSEFDRDA

SEQ ID NO: 17017 - protein, 25 aa, Artificial Sequence
  Description of Artificial Sequence: Synthetic peptide
LSHFVNLDNLRANNTKGSLPINVIV

SEQ ID NO: 17018 - protein, 25 aa, Artificial Sequence
  Description of Artificial Sequence: Synthetic peptide
EIKDTEKYCALAPNMMVTNNTFTLK

SEQ ID NO: 17019 - protein, 25 aa, Artificial Sequence
  Description of Artificial Sequence: Synthetic peptide
IKDTEKYCALAPNMMVTNNTFTLKG

SEQ ID NO: 17020 - protein, 25 aa, Artificial Sequence
  Description of Artificial Sequence: Synthetic peptide
GGQIVTCAKEIKESVQTFFKLVNKF

SEQ ID NO: 17021 - protein, 25 aa, Artificial Sequence
  Description of Artificial Sequence: Synthetic peptide
KAGQKTYERHSLSHFVNLDNLRANN

SEQ ID NO: 17022 - protein, 25 aa, Artificial Sequence
  Description of Artificial Sequence: Synthetic peptide
TLQAIASEFSSLPSYAAFATAQEAY

SEQ ID NO: 17023 - protein, 25 aa, Artificial Sequence
  Description of Artificial Sequence: Synthetic peptide
NIFGTVYEKLKPVLDWLEEKFKEGV

SEQ ID NO: 17024 - protein, 25 aa, Artificial Sequence
  Description of Artificial Sequence: Synthetic peptide
FGTVYEKLKPVLDWLEEKFKEGVEF

SEQ ID NO: 17025 - protein, 25 aa, Artificial Sequence
  Description of Artificial Sequence: Synthetic peptide
KDTEKYCALAPNMMVTNNTFTLKGG

SEQ ID NO: 17026 - protein, 25 aa, Artificial Sequence
  Description of Artificial Sequence: Synthetic peptide
ELQTPFEIKLAKKFDTFNGECPNFV

SEQ ID NO: 17027 - protein, 25 aa, Artificial Sequence
  Description of Artificial Sequence: Synthetic peptide
SYELQTPFEIKLAKKFDTFNGECPN

SEQ ID NO: 17028 - protein, 25 aa, Artificial Sequence
  Description of Artificial Sequence: Synthetic peptide
YELQTPFEIKLAKKFDTFNGECPNF

SEQ ID NO: 17029 - protein, 25 aa, Artificial Sequence
  Description of Artificial Sequence: Synthetic peptide
LQTPFEIKLAKKFDTFNGECPNFVF

SEQ ID NO: 17030 - protein, 25 aa, Artificial Sequence
  Description of Artificial Sequence: Synthetic peptide
MELTPVVQTIEVNSFSGYLKLTDNV

SEQ ID NO: 17031 - protein, 25 aa, Artificial Sequence
  Description of Artificial Sequence: Synthetic peptide
VGDVVQEGVLTAVVIPTKKAGGTTE

SEQ ID NO: 17032 - protein, 25 aa, Artificial Sequence
  Description of Artificial Sequence: Synthetic peptide
DVVQEGVLTAVVIPTKKAGGTTEML

SEQ ID NO: 17033 - protein, 25 aa, Artificial Sequence
  Description of Artificial Sequence: Synthetic peptide
GDVVQEGVLTAVVIPTKKAGGTTEM

SEQ ID NO: 17034 - protein, 25 aa, Artificial Sequence
  Description of Artificial Sequence: Synthetic peptide
ASGGQPITNCVKMLCTHTGTGQAIT

SEQ ID NO: 17035 - protein, 25 aa, Artificial Sequence
  Description of Artificial Sequence: Synthetic peptide
NLGETFVTHSKGLYRKCVKSREETG

SEQ ID NO: 17036 - protein, 25 aa, Artificial Sequence
  Description of Artificial Sequence: Synthetic peptide
AVFDKNLYDKLVSSFLEMKSEKQVE

SEQ ID NO: 17037 - protein, 25 aa, Artificial Sequence
  Description of Artificial Sequence: Synthetic peptide
ASFNYLKSPNFSKLINIIIWFLLLS

SEQ ID NO: 17038 - protein, 25 aa, Artificial Sequence
  Description of Artificial Sequence: Synthetic peptide
VFLFVAAIFYLITPVHVMSKHTDFS

SEQ ID NO: 17039 - protein, 25 aa, Artificial Sequence
  Description of Artificial Sequence: Synthetic peptide
FLFVAAIFYLITPVHVMSKHTDFSS

SEQ ID NO: 17040 - protein, 25 aa, Artificial Sequence
  Description of Artificial Sequence: Synthetic peptide
FTCASEYTGNYQCGHYKHITSKETL

SEQ ID NO: 17041 - protein, 25 aa, Artificial Sequence
  Description of Artificial Sequence: Synthetic peptide
STSAFVETVKGLDYKAFKQIVESCG

SEQ ID NO: 17042 - protein, 25 aa, Artificial Sequence
  Description of Artificial Sequence: Synthetic peptide
TSAFVETVKGLDYKAFKQIVESCGN

SEQ ID NO: 17043 - protein, 25 aa, Artificial Sequence
  Description of Artificial Sequence: Synthetic peptide
TSQWLTNIFGTVYEKLKPVLDWLEE

SEQ ID NO: 17044 - protein, 25 aa, Artificial Sequence
  Description of Artificial Sequence: Synthetic peptide
GWEIVKFISTCACEIVGGQIVTCAK

SEQ ID NO: 17045 - protein, 25 aa, Artificial Sequence
  Description of Artificial Sequence: Synthetic peptide
TNIFGTVYEKLKPVLDWLEEKFKEG

SEQ ID NO: 17046 - protein, 25 aa, Artificial Sequence
  Description of Artificial Sequence: Synthetic peptide
LSFCAFAVDAAKAYKDYLASGGQPI

SEQ ID NO: 17047 - protein, 25 aa, Artificial Sequence
  Description of Artificial Sequence: Synthetic peptide
VLSFCAFAVDAAKAYKDYLASGGQP

SEQ ID NO: 17048 - protein, 25 aa, Artificial Sequence
  Description of Artificial Sequence: Synthetic peptide
IVKFISTCACEIVGGQIVTCAKEIK

SEQ ID NO: 17049 - protein, 25 aa, Artificial Sequence
  Description of Artificial Sequence: Synthetic peptide
FNVPMEKLKTLVATAEAELAKNVSL

SEQ ID NO: 17050 - protein, 25 aa, Artificial Sequence
  Description of Artificial Sequence: Synthetic peptide
TFNVPMEKLKTLVATAEAELAKNVS

SEQ ID NO: 17051 - protein, 25 aa, Artificial Sequence
  Description of Artificial Sequence: Synthetic peptide
PTTFHLDGEVITFDNLKTLLSLREV

SEQ ID NO: 17052 - protein, 25 aa, Artificial Sequence
  Description of Artificial Sequence: Synthetic peptide
AIILASFSASTSAFVETVKGLDYKA

SEQ ID NO: 17053 - protein, 25 aa, Artificial Sequence
  Description of Artificial Sequence: Synthetic peptide
IAIILASFSASTSAFVETVKGLDYK

SEQ ID NO: 17054 - protein, 25 aa, Artificial Sequence
  Description of Artificial Sequence: Synthetic peptide
EIVKFISTCACEIVGGQIVTCAKEI

SEQ ID NO: 17055 - protein, 25 aa, Artificial Sequence
  Description of Artificial Sequence: Synthetic peptide
TSSSKTPEEHFIETISLAGSYKDWS

SEQ ID NO: 17056 - protein, 25 aa, Artificial Sequence
  Description of Artificial Sequence: Synthetic peptide
KTPEEHFIETISLAGSYKDWSYSGQ

SEQ ID NO: 17057 - protein, 25 aa, Artificial Sequence
  Description of Artificial Sequence: Synthetic peptide
SSSKTPEEHFIETISLAGSYKDWSY

SEQ ID NO: 17058 - protein, 25 aa, Artificial Sequence
  Description of Artificial Sequence: Synthetic peptide
SKTPEEHFIETISLAGSYKDWSYSG

SEQ ID NO: 17059 - protein, 25 aa, Artificial Sequence
  Description of Artificial Sequence: Synthetic peptide
SSKTPEEHFIETISLAGSYKDWSYS

SEQ ID NO: 17060 - protein, 25 aa, Artificial Sequence
  Description of Artificial Sequence: Synthetic peptide
AYITGGVVQLTSQWLTNIFGTVYEK

SEQ ID NO: 17061 - protein, 25 aa, Artificial Sequence
  Description of Artificial Sequence: Synthetic peptide
ATNNLVVMAYITGGVVQLTSQWLTN

SEQ ID NO: 17062 - protein, 25 aa, Artificial Sequence
  Description of Artificial Sequence: Synthetic peptide
TNNLVVMAYITGGVVQLTSQWLTNI

SEQ ID NO: 17063 - protein, 25 aa, Artificial Sequence
  Description of Artificial Sequence: Synthetic peptide
LVVMAYITGGVVQLTSQWLTNIFGT

SEQ ID NO: 17064 - protein, 25 aa, Artificial Sequence
  Description of Artificial Sequence: Synthetic peptide
MAYITGGVVQLTSQWLTNIFGTVYE

SEQ ID NO: 17065 - protein, 25 aa, Artificial Sequence
  Description of Artificial Sequence: Synthetic peptide
YITGGVVQLTSQWLTNIFGTVYEKL

SEQ ID NO: 17066 - protein, 25 aa, Artificial Sequence
  Description of Artificial Sequence: Synthetic peptide
VMAYITGGVVQLTSQWLTNIFGTVY

SEQ ID NO: 17067 - protein, 25 aa, Artificial Sequence
  Description of Artificial Sequence: Synthetic peptide
VVMAYITGGVVQLTSQWLTNIFGTV

SEQ ID NO: 17068 - protein, 25 aa, Artificial Sequence
  Description of Artificial Sequence: Synthetic peptide
NLVVMAYITGGVVQLTSQWLTNIFG

SEQ ID NO: 17069 - protein, 25 aa, Artificial Sequence
  Description of Artificial Sequence: Synthetic peptide
NNLVVMAYITGGVVQLTSQWLTNIF

SEQ ID NO: 17070 - protein, 25 aa, Artificial Sequence
  Description of Artificial Sequence: Synthetic peptide
VVPGLPGTILRTTNGDFLHFLPRVF

SEQ ID NO: 17071 - protein, 25 aa, Artificial Sequence
  Description of Artificial Sequence: Synthetic peptide
GFVVPGLPGTILRTTNGDFLHFLPR

SEQ ID NO: 17072 - protein, 25 aa, Artificial Sequence
  Description of Artificial Sequence: Synthetic peptide
FVVPGLPGTILRTTNGDFLHFLPRV

SEQ ID NO: 17073 - protein, 25 aa, Artificial Sequence
  Description of Artificial Sequence: Synthetic peptide
VDAAKAYKDYLASGGQPITNCVKML

SEQ ID NO: 17074 - protein, 25 aa, Artificial Sequence
  Description of Artificial Sequence: Synthetic peptide
SLRPDTRYVLMDGSIIQFPNTYLEG

SEQ ID NO: 17075 - protein, 25 aa, Artificial Sequence
  Description of Artificial Sequence: Synthetic peptide
HYKHITSKETLYCIDGALLTKSSEY

SEQ ID NO: 17076 - protein, 25 aa, Artificial Sequence
  Description of Artificial Sequence: Synthetic peptide
SVQTFFKLVNKFLALCADSIIIGGA

SEQ ID NO: 17077 - protein, 25 aa, Artificial Sequence
  Description of Artificial Sequence: Synthetic peptide
YESLRPDTRYVLMDGSIIQFPNTYL

SEQ ID NO: 17078 - protein, 25 aa, Artificial Sequence
  Description of Artificial Sequence: Synthetic peptide
AYESLRPDTRYVLMDGSIIQFPNTY

SEQ ID NO: 17079 - protein, 25 aa, Artificial Sequence
  Description of Artificial Sequence: Synthetic peptide
ESLRPDTRYVLMDGSIIQFPNTYLE

SEQ ID NO: 17080 - protein, 25 aa, Artificial Sequence
  Description of Artificial Sequence: Synthetic peptide
ILLAKDTTEAFEKMVSLLSVLLSMQ

SEQ ID NO: 17081 - protein, 25 aa, Artificial Sequence
  Description of Artificial Sequence: Synthetic peptide
VPGLPGTILRTTNGDFLHFLPRVFS

SEQ ID NO: 17082 - protein, 25 aa, Artificial Sequence
  Description of Artificial Sequence: Synthetic peptide
VQTFFKLVNKFLALCADSIIIGGAK

SEQ ID NO: 17083 - protein, 25 aa, Artificial Sequence
  Description of Artificial Sequence: Synthetic peptide
DGEVITFDNLKTLLSLREVRTIKVF

SEQ ID NO: 17084 - protein, 25 aa, Artificial Sequence
  Description of Artificial Sequence: Synthetic peptide
VAKSHNIALIWNVKDFMSLSEQLRK

SEQ ID NO: 17085 - protein, 25 aa, Artificial Sequence
  Description of Artificial Sequence: Synthetic peptide
KFCLEASFNYLKSPNFSKLINIIIW

SEQ ID NO: 17086 - protein, 25 aa, Artificial Sequence
  Description of Artificial Sequence: Synthetic peptide
FCLEASFNYLKSPNFSKLINIIIWF

SEQ ID NO: 17087 - protein, 25 aa, Artificial Sequence
  Description of Artificial Sequence: Synthetic peptide
GKFCLEASFNYLKSPNFSKLINIII

SEQ ID NO: 17088 - protein, 25 aa, Artificial Sequence
  Description of Artificial Sequence: Synthetic peptide
VKFISTCACEIVGGQIVTCAKEIKE

SEQ ID NO: 17089 - protein, 25 aa, Artificial Sequence
  Description of Artificial Sequence: Synthetic peptide
TLGVYDYLVSTQEFRYMNSQGLLPP

SEQ ID NO: 17090 - protein, 25 aa, Artificial Sequence
  Description of Artificial Sequence: Synthetic peptide
VTKIKPHNSHEGKTFYVLPNDDTLR

SEQ ID NO: 17091 - protein, 25 aa, Artificial Sequence
  Description of Artificial Sequence: Synthetic peptide
YKDYLASGGQPITNCVKMLCTHTGT

SEQ ID NO: 17092 - protein, 25 aa, Artificial Sequence
  Description of Artificial Sequence: Synthetic peptide
NGDSEVVLKKLKKSLNVAKSEFDRD

SEQ ID NO: 17093 - protein, 25 aa, Artificial Sequence
  Description of Artificial Sequence: Synthetic peptide
ANGDSEVVLKKLKKSLNVAKSEFDR

SEQ ID NO: 17094 - protein, 25 aa, Artificial Sequence
  Description of Artificial Sequence: Synthetic peptide
VETSNSFDVLKSEDAQGMDNLACED

SEQ ID NO: 17095 - protein, 25 aa, Artificial Sequence
  Description of Artificial Sequence: Synthetic peptide
QTPFEIKLAKKFDTFNGECPNFVFP

SEQ ID NO: 17096 - protein, 25 aa, Artificial Sequence
  Description of Artificial Sequence: Synthetic peptide
TPFEIKLAKKFDTFNGECPNFVFPL

SEQ ID NO: 17097 - protein, 25 aa, Artificial Sequence
  Description of Artificial Sequence: Synthetic peptide
PGLPGTILRTTNGDFLHFLPRVFSA

SEQ ID NO: 17098 - protein, 25 aa, Artificial Sequence
  Description of Artificial Sequence: Synthetic peptide
SASTSAFVETVKGLDYKAFKQIVES

SEQ ID NO: 17099 - protein, 25 aa, Artificial Sequence
  Description of Artificial Sequence: Synthetic peptide
AGQKTYERHSLSHFVNLDNLRANNT

SEQ ID NO: 17100 - protein, 25 aa, Artificial Sequence
  Description of Artificial Sequence: Synthetic peptide
LLAKDTTEAFEKMVSLLSVLLSMQG

SEQ ID NO: 17101 - protein, 25 aa, Artificial Sequence
  Description of Artificial Sequence: Synthetic peptide
ETGLLMPLKAPKEIIFLEGETLPTE

SEQ ID NO: 17102 - protein, 25 aa, Artificial Sequence
  Description of Artificial Sequence: Synthetic peptide
VEEAKTVLKKCKSAFYILPSIISNE

SEQ ID NO: 17103 - protein, 25 aa, Artificial Sequence
  Description of Artificial Sequence: Synthetic peptide
WALIISVTSNYSGVVTTVMFLARGI

SEQ ID NO: 17104 - protein, 25 aa, Artificial Sequence
  Description of Artificial Sequence: Synthetic peptide
MWALIISVTSNYSGVVTTVMFLARG

SEQ ID NO: 17105 - protein, 25 aa, Artificial Sequence
  Description of Artificial Sequence: Synthetic peptide
SEKSYELQTPFEIKLAKKFDTFNGE

SEQ ID NO: 17106 - protein, 25 aa, Artificial Sequence
  Description of Artificial Sequence: Synthetic peptide
KPHNSHEGKTFYVLPNDDTLRVEAF

SEQ ID NO: 17107 - protein, 25 aa, Artificial Sequence
  Description of Artificial Sequence: Synthetic peptide
PHNSHEGKTFYVLPNDDTLRVEAFE

SEQ ID NO: 17108 - protein, 25 aa, Artificial Sequence
  Description of Artificial Sequence: Synthetic peptide
AFYILPSIISNEKQEILGTVSWNLR

SEQ ID NO: 17109 - protein, 25 aa, Artificial Sequence
  Description of Artificial Sequence: Synthetic peptide
FYILPSIISNEKQEILGTVSWNLRE

SEQ ID NO: 17110 - protein, 25 aa, Artificial Sequence
  Description of Artificial Sequence: Synthetic peptide
LEASFNYLKSPNFSKLINIIIWFLL

SEQ ID NO: 17111 - protein, 25 aa, Artificial Sequence
  Description of Artificial Sequence: Synthetic peptide
EASFNYLKSPNFSKLINIIIWFLLL

SEQ ID NO: 17112 - protein, 25 aa, Artificial Sequence
  Description of Artificial Sequence: Synthetic peptide
LQAIASEFSSLPSYAAFATAQEAYE

SEQ ID NO: 17113 - protein, 25 aa, Artificial Sequence
  Description of Artificial Sequence: Synthetic peptide
TCGTTTLNGLWLDDVVYCPRHVICT

SEQ ID NO: 17114 - protein, 25 aa, Artificial Sequence
  Description of Artificial Sequence: Synthetic peptide
KSYELQTPFEIKLAKKFDTFNGECP

SEQ ID NO: 17115 - protein, 25 aa, Artificial Sequence
  Description of Artificial Sequence: Synthetic peptide
EKSYELQTPFEIKLAKKFDTFNGEC

SEQ ID NO: 17116 - protein, 25 aa, Artificial Sequence
  Description of Artificial Sequence: Synthetic peptide
IFGTVYEKLKPVLDWLEEKFKEGVE

SEQ ID NO: 17117 - protein, 25 aa, Artificial Sequence
  Description of Artificial Sequence: Synthetic peptide
LASGGQPITNCVKMLCTHTGTGQAI

SEQ ID NO: 17118 - protein, 25 aa, Artificial Sequence
  Description of Artificial Sequence: Synthetic peptide
YLASGGQPITNCVKMLCTHTGTGQA

SEQ ID NO: 17119 - protein, 25 aa, Artificial Sequence
  Description of Artificial Sequence: Synthetic peptide
TPVVQTIEVNSFSGYLKLTDNVYIK

SEQ ID NO: 17120 - protein, 25 aa, Artificial Sequence
  Description of Artificial Sequence: Synthetic peptide
VAAIFYLITPVHVMSKHTDFSSEII

SEQ ID NO: 17121 - protein, 25 aa, Artificial Sequence
  Description of Artificial Sequence: Synthetic peptide
LFVAAIFYLITPVHVMSKHTDFSSE

SEQ ID NO: 17122 - protein, 25 aa, Artificial Sequence
  Description of Artificial Sequence: Synthetic peptide
AAIFYLITPVHVMSKHTDFSSEIIG

SEQ ID NO: 17123 - protein, 25 aa, Artificial Sequence
  Description of Artificial Sequence: Synthetic peptide
FVAAIFYLITPVHVMSKHTDFSSEI

SEQ ID NO: 17124 - protein, 25 aa, Artificial Sequence
  Description of Artificial Sequence: Synthetic peptide
TGGVVQLTSQWLTNIFGTVYEKLKP

SEQ ID NO: 17125 - protein, 25 aa, Artificial Sequence
  Description of Artificial Sequence: Synthetic peptide
QWLTNIFGTVYEKLKPVLDWLEEKF

SEQ ID NO: 17126 - protein, 25 aa, Artificial Sequence
  Description of Artificial Sequence: Synthetic peptide
SQWLTNIFGTVYEKLKPVLDWLEEK

SEQ ID NO: 17127 - protein, 25 aa, Artificial Sequence
  Description of Artificial Sequence: Synthetic peptide
PGQGLNGYTVEEAKTVLKKCKSAFY

SEQ ID NO: 17128 - protein, 25 aa, Artificial Sequence
  Description of Artificial Sequence: Synthetic peptide
ALIWNVKDFMSLSEQLRKQIRSAAK

SEQ ID NO: 17129 - protein, 25 aa, Artificial Sequence
  Description of Artificial Sequence: Synthetic peptide
IILASFSASTSAFVETVKGLDYKAF

SEQ ID NO: 17130 - protein, 25 aa, Artificial Sequence
  Description of Artificial Sequence: Synthetic peptide
DGWEIVKFISTCACEIVGGQIVTCA

SEQ ID NO: 17131 - protein, 25 aa, Artificial Sequence
  Description of Artificial Sequence: Synthetic peptide
RDGWEIVKFISTCACEIVGGQIVTC

SEQ ID NO: 17132 - protein, 25 aa, Artificial Sequence
  Description of Artificial Sequence: Synthetic peptide
VPTDNYITTYPGQGLNGYTVEEAKT

SEQ ID NO: 17133 - protein, 25 aa, Artificial Sequence
  Description of Artificial Sequence: Synthetic peptide
SFSASTSAFVETVKGLDYKAFKQIV

SEQ ID NO: 17134 - protein, 25 aa, Artificial Sequence
  Description of Artificial Sequence: Synthetic peptide
FSASTSAFVETVKGLDYKAFKQIVE

SEQ ID NO: 17135 - protein, 25 aa, Artificial Sequence
  Description of Artificial Sequence: Synthetic peptide
AIASEFSSLPSYAAFATAQEAYEQA

SEQ ID NO: 17136 - protein, 25 aa, Artificial Sequence
  Description of Artificial Sequence: Synthetic peptide
CLEASFNYLKSPNFSKLINIIIWFL

SEQ ID NO: 17137 - protein, 25 aa, Artificial Sequence
  Description of Artificial Sequence: Synthetic peptide
KDYLASGGQPITNCVKMLCTHTGTG

SEQ ID NO: 17138 - protein, 25 aa, Artificial Sequence
  Description of Artificial Sequence: Synthetic peptide
TKIKPHNSHEGKTFYVLPNDDTLRV

SEQ ID NO: 17139 - protein, 25 aa, Artificial Sequence
  Description of Artificial Sequence: Synthetic peptide
IKPHNSHEGKTFYVLPNDDTLRVEA

SEQ ID NO: 17140 - protein, 25 aa, Artificial Sequence
  Description of Artificial Sequence: Synthetic peptide
KIKPHNSHEGKTFYVLPNDDTLRVE

SEQ ID NO: 17141 - protein, 25 aa, Artificial Sequence
  Description of Artificial Sequence: Synthetic peptide
PVETSNSFDVLKSEDAQGMDNLACE

SEQ ID NO: 17142 - protein, 25 aa, Artificial Sequence
  Description of Artificial Sequence: Synthetic peptide
KPVETSNSFDVLKSEDAQGMDNLAC

SEQ ID NO: 17143 - protein, 25 aa, Artificial Sequence
  Description of Artificial Sequence: Synthetic peptide
WSTKPVETSNSFDVLKSEDAQGMDN

SEQ ID NO: 17144 - protein, 25 aa, Artificial Sequence
  Description of Artificial Sequence: Synthetic peptide
STKPVETSNSFDVLKSEDAQGMDNL

SEQ ID NO: 17145 - protein, 25 aa, Artificial Sequence
  Description of Artificial Sequence: Synthetic peptide
TKPVETSNSFDVLKSEDAQGMDNLA

SEQ ID NO: 17146 - protein, 25 aa, Artificial Sequence
  Description of Artificial Sequence: Synthetic peptide
GQKTYERHSLSHFVNLDNLRANNTK

SEQ ID NO: 17147 - protein, 25 aa, Artificial Sequence
  Description of Artificial Sequence: Synthetic peptide
AKDTTEAFEKMVSLLSVLLSMQGAV

SEQ ID NO: 17148 - protein, 25 aa, Artificial Sequence
  Description of Artificial Sequence: Synthetic peptide
KDTTEAFEKMVSLLSVLLSMQGAVD

SEQ ID NO: 17149 - protein, 25 aa, Artificial Sequence
  Description of Artificial Sequence: Synthetic peptide
LAKDTTEAFEKMVSLLSVLLSMQGA

SEQ ID NO: 17150 - protein, 25 aa, Artificial Sequence
  Description of Artificial Sequence: Synthetic peptide
LVSSFLEMKSEKQVEQKIAEIPKEE

SEQ ID NO: 17151 - protein, 25 aa, Artificial Sequence
  Description of Artificial Sequence: Synthetic peptide
TILRTTNGDFLHFLPRVFSAVGNIC

SEQ ID NO: 17152 - protein, 25 aa, Artificial Sequence
  Description of Artificial Sequence: Synthetic peptide
YILPSIISNEKQEILGTVSWNLREM

SEQ ID NO: 17153 - protein, 25 aa, Artificial Sequence
  Description of Artificial Sequence: Synthetic peptide
KEIKESVQTFFKLVNKFLALCADSI

SEQ ID NO: 17154 - protein, 25 aa, Artificial Sequence
  Description of Artificial Sequence: Synthetic peptide
AKEIKESVQTFFKLVNKFLALCADS

SEQ ID NO: 17155 - protein, 25 aa, Artificial Sequence
  Description of Artificial Sequence: Synthetic peptide
VFDKNLYDKLVSSFLEMKSEKQVEQ

SEQ ID NO: 17156 - protein, 25 aa, Artificial Sequence
  Description of Artificial Sequence: Synthetic peptide
KGVEAVMYMGTLSYEQFKKGVQIPC

SEQ ID NO: 17157 - protein, 25 aa, Artificial Sequence
  Description of Artificial Sequence: Synthetic peptide
TCASEYTGNYQCGHYKHITSKETLY

SEQ ID NO: 17158 - protein, 25 aa, Artificial Sequence
  Description of Artificial Sequence: Synthetic peptide
LKGVEAVMYMGTLSYEQFKKGVQIP

SEQ ID NO: 17159 - protein, 25 aa, Artificial Sequence
  Description of Artificial Sequence: Synthetic peptide
ITGGVVQLTSQWLTNIFGTVYEKLK

SEQ ID NO: 17160 - protein, 25 aa, Artificial Sequence
  Description of Artificial Sequence: Synthetic peptide
WLTNIFGTVYEKLKPVLDWLEEKFK

SEQ ID NO: 17161 - protein, 25 aa, Artificial Sequence
  Description of Artificial Sequence: Synthetic peptide
LTNIFGTVYEKLKPVLDWLEEKFKE

SEQ ID NO: 17162 - protein, 25 aa, Artificial Sequence
  Description of Artificial Sequence: Synthetic peptide
QTTLKGVEAVMYMGTLSYEQFKKGV

SEQ ID NO: 17163 - protein, 25 aa, Artificial Sequence
  Description of Artificial Sequence: Synthetic peptide
QQTTLKGVEAVMYMGTLSYEQFKKG

SEQ ID NO: 17164 - protein, 25 aa, Artificial Sequence
  Description of Artificial Sequence: Synthetic peptide
QQQTTLKGVEAVMYMGTLSYEQFKK

SEQ ID NO: 17165 - protein, 25 aa, Artificial Sequence
  Description of Artificial Sequence: Synthetic peptide
SFCAFAVDAAKAYKDYLASGGQPIT

SEQ ID NO: 17166 - protein, 25 aa, Artificial Sequence
  Description of Artificial Sequence: Synthetic peptide
IALIWNVKDFMSLSEQLRKQIRSAA

SEQ ID NO: 17167 - protein, 25 aa, Artificial Sequence
  Description of Artificial Sequence: Synthetic peptide
NIALIWNVKDFMSLSEQLRKQIRSA

SEQ ID NO: 17168 - protein, 25 aa, Artificial Sequence
  Description of Artificial Sequence: Synthetic peptide
IASEFSSLPSYAAFATAQEAYEQAV

SEQ ID NO: 17169 - protein, 25 aa, Artificial Sequence
  Description of Artificial Sequence: Synthetic peptide
AVDAAKAYKDYLASGGQPITNCVKM

SEQ ID NO: 17170 - protein, 25 aa, Artificial Sequence
  Description of Artificial Sequence: Synthetic peptide
GVEFLRDGWEIVKFISTCACEIVGG

SEQ ID NO: 17171 - protein, 25 aa, Artificial Sequence
  Description of Artificial Sequence: Synthetic peptide
EGVEFLRDGWEIVKFISTCACEIVG

SEQ ID NO: 17172 - protein, 25 aa, Artificial Sequence
  Description of Artificial Sequence: Synthetic peptide
KVPTDNYITTYPGQGLNGYTVEEAK

SEQ ID NO: 17173 - protein, 25 aa, Artificial Sequence
  Description of Artificial Sequence: Synthetic peptide
NGDFLHFLPRVFSAVGNICYTPSKL

SEQ ID NO: 17174 - protein, 25 aa, Artificial Sequence
  Description of Artificial Sequence: Synthetic peptide
LRPDTRYVLMDGSIIQFPNTYLEGS

SEQ ID NO: 17175 - protein, 25 aa, Artificial Sequence
  Description of Artificial Sequence: Synthetic peptide
QCGHYKHITSKETLYCIDGALLTKS

SEQ ID NO: 17176 - protein, 25 aa, Artificial Sequence
  Description of Artificial Sequence: Synthetic peptide
YQCGHYKHITSKETLYCIDGALLTK

SEQ ID NO: 17177 - protein, 25 aa, Artificial Sequence
  Description of Artificial Sequence: Synthetic peptide
NYQCGHYKHITSKETLYCIDGALLT

SEQ ID NO: 17178 - protein, 25 aa, Artificial Sequence
  Description of Artificial Sequence: Synthetic peptide
LPGTILRTTNGDFLHFLPRVFSAVG

SEQ ID NO: 17179 - protein, 25 aa, Artificial Sequence
  Description of Artificial Sequence: Synthetic peptide
KFISTCACEIVGGQIVTCAKEIKES

SEQ ID NO: 17180 - protein, 25 aa, Artificial Sequence
  Description of Artificial Sequence: Synthetic peptide
FISTCACEIVGGQIVTCAKEIKESV

SEQ ID NO: 17181 - protein, 25 aa, Artificial Sequence
  Description of Artificial Sequence: Synthetic peptide
ILRTTNGDFLHFLPRVFSAVGNICY

SEQ ID NO: 17182 - protein, 25 aa, Artificial Sequence
  Description of Artificial Sequence: Synthetic peptide
LRTTNGDFLHFLPRVFSAVGNICYT

SEQ ID NO: 17183 - protein, 25 aa, Artificial Sequence
  Description of Artificial Sequence: Synthetic peptide
RTTNGDFLHFLPRVFSAVGNICYTP

SEQ ID NO: 17184 - protein, 25 aa, Artificial Sequence
  Description of Artificial Sequence: Synthetic peptide
LPSIISNEKQEILGTVSWNLREMLA

SEQ ID NO: 17185 - protein, 25 aa, Artificial Sequence
  Description of Artificial Sequence: Synthetic peptide
ILPSIISNEKQEILGTVSWNLREML

SEQ ID NO: 17186 - protein, 25 aa, Artificial Sequence
  Description of Artificial Sequence: Synthetic peptide
HSLSHFVNLDNLRANNTKGSLPINV

SEQ ID NO: 17187 - protein, 25 aa, Artificial Sequence
  Description of Artificial Sequence: Synthetic peptide
SLSHFVNLDNLRANNTKGSLPINVI

SEQ ID NO: 17188 - protein, 25 aa, Artificial Sequence
  Description of Artificial Sequence: Synthetic peptide
TYERHSLSHFVNLDNLRANNTKGSL

SEQ ID NO: 17189 - protein, 25 aa, Artificial Sequence
  Description of Artificial Sequence: Synthetic peptide
QKTYERHSLSHFVNLDNLRANNTKG

SEQ ID NO: 17190 - protein, 25 aa, Artificial Sequence
  Description of Artificial Sequence: Synthetic peptide
KTYERHSLSHFVNLDNLRANNTKGS

SEQ ID NO: 17191 - protein, 25 aa, Artificial Sequence
  Description of Artificial Sequence: Synthetic peptide
SAFYILPSIISNEKQEILGTVSWNL

SEQ ID NO: 17192 - protein, 25 aa, Artificial Sequence
  Description of Artificial Sequence: Synthetic peptide
PGTILRTTNGDFLHFLPRVFSAVGN

SEQ ID NO: 17193 - protein, 25 aa, Artificial Sequence
  Description of Artificial Sequence: Synthetic peptide
GTILRTTNGDFLHFLPRVFSAVGNI

SEQ ID NO: 17194 - protein, 25 aa, Artificial Sequence
  Description of Artificial Sequence: Synthetic peptide
KLVSSFLEMKSEKQVEQKIAEIPKE

SEQ ID NO: 17195 - protein, 25 aa, Artificial Sequence
  Description of Artificial Sequence: Synthetic peptide
DKLVSSFLEMKSEKQVEQKIAEIPK

SEQ ID NO: 17196 - protein, 25 aa, Artificial Sequence
  Description of Artificial Sequence: Synthetic peptide
DKNLYDKLVSSFLEMKSEKQVEQKI

SEQ ID NO: 17197 - protein, 25 aa, Artificial Sequence
  Description of Artificial Sequence: Synthetic peptide
NLYDKLVSSFLEMKSEKQVEQKIAE

SEQ ID NO: 17198 - protein, 25 aa, Artificial Sequence
  Description of Artificial Sequence: Synthetic peptide
FDKNLYDKLVSSFLEMKSEKQVEQK

SEQ ID NO: 17199 - protein, 25 aa, Artificial Sequence
  Description of Artificial Sequence: Synthetic peptide
LYDKLVSSFLEMKSEKQVEQKIAEI

SEQ ID NO: 17200 - protein, 25 aa, Artificial Sequence
  Description of Artificial Sequence: Synthetic peptide
YDKLVSSFLEMKSEKQVEQKIAEIP

SEQ ID NO: 17201 - protein, 25 aa, Artificial Sequence
  Description of Artificial Sequence: Synthetic peptide
KNLYDKLVSSFLEMKSEKQVEQKIA

SEQ ID NO: 17202 - protein, 25 aa, Artificial Sequence
  Description of Artificial Sequence: Synthetic peptide
IKESVQTFFKLVNKFLALCADSIII

SEQ ID NO: 17203 - protein, 25 aa, Artificial Sequence
  Description of Artificial Sequence: Synthetic peptide
EIKESVQTFFKLVNKFLALCADSII

SEQ ID NO: 17204 - protein, 25 aa, Artificial Sequence
  Description of Artificial Sequence: Synthetic peptide
GTTTLNGLWLDDVVYCPRHVICTSE

SEQ ID NO: 17205 - protein, 25 aa, Artificial Sequence
  Description of Artificial Sequence: Synthetic peptide
CGTTTLNGLWLDDVVYCPRHVICTS

SEQ ID NO: 17206 - protein, 25 aa, Artificial Sequence
  Description of Artificial Sequence: Synthetic peptide
GVEAVMYMGTLSYEQFKKGVQIPCT

SEQ ID NO: 17207 - protein, 25 aa, Artificial Sequence
  Description of Artificial Sequence: Synthetic peptide
ASEYTGNYQCGHYKHITSKETLYCI

SEQ ID NO: 17208 - protein, 25 aa, Artificial Sequence
  Description of Artificial Sequence: Synthetic peptide
SEYTGNYQCGHYKHITSKETLYCID

SEQ ID NO: 17209 - protein, 25 aa, Artificial Sequence
  Description of Artificial Sequence: Synthetic peptide
CASEYTGNYQCGHYKHITSKETLYC

SEQ ID NO: 17210 - protein, 25 aa, Artificial Sequence
  Description of Artificial Sequence: Synthetic peptide
TLKGVEAVMYMGTLSYEQFKKGVQI

SEQ ID NO: 17211 - protein, 25 aa, Artificial Sequence
  Description of Artificial Sequence: Synthetic peptide
TTLKGVEAVMYMGTLSYEQFKKGVQ

SEQ ID NO: 17212 - protein, 25 aa, Artificial Sequence
  Description of Artificial Sequence: Synthetic peptide
KSHNIALIWNVKDFMSLSEQLRKQI

SEQ ID NO: 17213 - protein, 25 aa, Artificial Sequence
  Description of Artificial Sequence: Synthetic peptide
SHNIALIWNVKDFMSLSEQLRKQIR

SEQ ID NO: 17214 - protein, 25 aa, Artificial Sequence
  Description of Artificial Sequence: Synthetic peptide
HNIALIWNVKDFMSLSEQLRKQIRS

SEQ ID NO: 17215 - protein, 25 aa, Artificial Sequence
  Description of Artificial Sequence: Synthetic peptide
EFLRDGWEIVKFISTCACEIVGGQI

SEQ ID NO: 17216 - protein, 25 aa, Artificial Sequence
  Description of Artificial Sequence: Synthetic peptide
VEFLRDGWEIVKFISTCACEIVGGQ

SEQ ID NO: 17217 - protein, 25 aa, Artificial Sequence
  Description of Artificial Sequence: Synthetic peptide
QAIASEFSSLPSYAAFATAQEAYEQ

SEQ ID NO: 17218 - protein, 25 aa, Artificial Sequence
  Description of Artificial Sequence: Synthetic peptide
GNYQCGHYKHITSKETLYCIDGALL

SEQ ID NO: 17219 - protein, 25 aa, Artificial Sequence
  Description of Artificial Sequence: Synthetic peptide
VGGQIVTCAKEIKESVQTFFKLVNK

SEQ ID NO: 17220 - protein, 25 aa, Artificial Sequence
  Description of Artificial Sequence: Synthetic peptide
RHSLSHFVNLDNLRANNTKGSLPIN

SEQ ID NO: 17221 - protein, 25 aa, Artificial Sequence
  Description of Artificial Sequence: Synthetic peptide
ERHSLSHFVNLDNLRANNTKGSLPI

SEQ ID NO: 17222 - protein, 25 aa, Artificial Sequence
  Description of Artificial Sequence: Synthetic peptide
YERHSLSHFVNLDNLRANNTKGSLP

SEQ ID NO: 17223 - protein, 25 aa, Artificial Sequence
  Description of Artificial Sequence: Synthetic peptide
EEAKTVLKKCKSAFYILPSIISNEK

SEQ ID NO: 17224 - protein, 25 aa, Artificial Sequence
  Description of Artificial Sequence: Synthetic peptide
TTTLNGLWLDDVVYCPRHVICTSED

SEQ ID NO: 17225 - protein, 25 aa, Artificial Sequence
  Description of Artificial Sequence: Synthetic peptide
LRDGWEIVKFISTCACEIVGGQIVT

SEQ ID NO: 17226 - protein, 25 aa, Artificial Sequence
  Description of Artificial Sequence: Synthetic peptide
FLRDGWEIVKFISTCACEIVGGQIV

SEQ ID NO: 17227 - protein, 25 aa, Artificial Sequence
  Description of Artificial Sequence: Synthetic peptide
AKSHNIALIWNVKDFMSLSEQLRKQ

SEQ ID NO: 17228 - protein, 25 aa, Artificial Sequence
  Description of Artificial Sequence: Synthetic peptide
FAVDAAKAYKDYLASGGQPITNCVK

SEQ ID NO: 17229 - protein, 25 aa, Artificial Sequence
  Description of Artificial Sequence: Synthetic peptide
TFHLDGEVITFDNLKTLLSLREVRT

SEQ ID NO: 17230 - protein, 25 aa, Artificial Sequence
  Description of Artificial Sequence: Synthetic peptide
HLDGEVITFDNLKTLLSLREVRTIK

SEQ ID NO: 17231 - protein, 25 aa, Artificial Sequence
  Description of Artificial Sequence: Synthetic peptide
FHLDGEVITFDNLKTLLSLREVRTI

SEQ ID NO: 17232 - protein, 25 aa, Artificial Sequence
  Description of Artificial Sequence: Synthetic peptide
TTFHLDGEVITFDNLKTLLSLREVR

SEQ ID NO: 17233 - protein, 25 aa, Artificial Sequence
  Description of Artificial Sequence: Synthetic peptide
ILASFSASTSAFVETVKGLDYKAFK

SEQ ID NO: 17234 - protein, 25 aa, Artificial Sequence
  Description of Artificial Sequence: Synthetic peptide
ASFSASTSAFVETVKGLDYKAFKQI

SEQ ID NO: 17235 - protein, 25 aa, Artificial Sequence
  Description of Artificial Sequence: Synthetic peptide
DDVVYCPRHVICTSEDMLNPNYEDL

SEQ ID NO: 17236 - protein, 25 aa, Artificial Sequence
  Description of Artificial Sequence: Synthetic peptide
ESVQTFFKLVNKFLALCADSIIIGG

SEQ ID NO: 17237 - protein, 25 aa, Artificial Sequence
  Description of Artificial Sequence: Synthetic peptide
EIVGGQIVTCAKEIKESVQTFFKLV

SEQ ID NO: 17238 - protein, 25 aa, Artificial Sequence
  Description of Artificial Sequence: Synthetic peptide
CEIVGGQIVTCAKEIKESVQTFFKL

SEQ ID NO: 17239 - protein, 25 aa, Artificial Sequence
  Description of Artificial Sequence: Synthetic peptide
TVLKKCKSAFYILPSIISNEKQEIL

SEQ ID NO: 17240 - protein, 25 aa, Artificial Sequence
  Description of Artificial Sequence: Synthetic peptide
TTNGDFLHFLPRVFSAVGNICYTPS

SEQ ID NO: 17241 - protein, 25 aa, Artificial Sequence
  Description of Artificial Sequence: Synthetic peptide
TGNYQCGHYKHITSKETLYCIDGAL

SEQ ID NO: 17242 - protein, 25 aa, Artificial Sequence
  Description of Artificial Sequence: Synthetic peptide
YTGNYQCGHYKHITSKETLYCIDGA

SEQ ID NO: 17243 - protein, 25 aa, Artificial Sequence
  Description of Artificial Sequence: Synthetic peptide
EYTGNYQCGHYKHITSKETLYCIDG

SEQ ID NO: 17244 - protein, 25 aa, Artificial Sequence
  Description of Artificial Sequence: Synthetic peptide
FCAFAVDAAKAYKDYLASGGQPITN

SEQ ID NO: 17245 - protein, 25 aa, Artificial Sequence
  Description of Artificial Sequence: Synthetic peptide
CAFAVDAAKAYKDYLASGGQPITNC

SEQ ID NO: 17246 - protein, 25 aa, Artificial Sequence
  Description of Artificial Sequence: Synthetic peptide
AFAVDAAKAYKDYLASGGQPITNCV

SEQ ID NO: 17247 - protein, 25 aa, Artificial Sequence
  Description of Artificial Sequence: Synthetic peptide
LASFSASTSAFVETVKGLDYKAFKQ

SEQ ID NO: 17248 - protein, 25 aa, Artificial Sequence
  Description of Artificial Sequence: Synthetic peptide
LDGEVITFDNLKTLLSLREVRTIKV

SEQ ID NO: 17249 - protein, 25 aa, Artificial Sequence
  Description of Artificial Sequence: Synthetic peptide
CACEIVGGQIVTCAKEIKESVQTFF

SEQ ID NO: 17250 - protein, 25 aa, Artificial Sequence
  Description of Artificial Sequence: Synthetic peptide
ISTCACEIVGGQIVTCAKEIKESVQ

SEQ ID NO: 17251 - protein, 25 aa, Artificial Sequence
  Description of Artificial Sequence: Synthetic peptide
STCACEIVGGQIVTCAKEIKESVQT

SEQ ID NO: 17252 - protein, 25 aa, Artificial Sequence
  Description of Artificial Sequence: Synthetic peptide
TCACEIVGGQIVTCAKEIKESVQTF

SEQ ID NO: 17253 - protein, 25 aa, Artificial Sequence
  Description of Artificial Sequence: Synthetic peptide
ACEIVGGQIVTCAKEIKESVQTFFK

SEQ ID NO: 17254 - protein, 25 aa, Artificial Sequence
  Description of Artificial Sequence: Synthetic peptide
SPFVMMSAPPAQYELKHGTFTCASE

SEQ ID NO: 17255 - protein, 25 aa, Artificial Sequence
  Description of Artificial Sequence: Synthetic peptide
IVGGQIVTCAKEIKESVQTFFKLVN

SEQ ID NO: 17256 - protein, 25 aa, Artificial Sequence
  Description of Artificial Sequence: Synthetic peptide
KTVLKKCKSAFYILPSIISNEKQEI

SEQ ID NO: 17257 - protein, 25 aa, Artificial Sequence
  Description of Artificial Sequence: Synthetic peptide
KESVQTFFKLVNKFLALCADSIIIG

SEQ ID NO: 17258 - protein, 25 aa, Artificial Sequence
  Description of Artificial Sequence: Synthetic peptide
AKTVLKKCKSAFYILPSIISNEKQE

SEQ ID NO: 17259 - protein, 25 aa, Artificial Sequence
  Description of Artificial Sequence: Synthetic peptide
EAKTVLKKCKSAFYILPSIISNEKQ

SEQ ID NO: 17260 - protein, 25 aa, Artificial Sequence
  Description of Artificial Sequence: Synthetic peptide
TTLNGLWLDDVVYCPRHVICTSEDM

SEQ ID NO: 17261 - protein, 25 aa, Artificial Sequence
  Description of Artificial Sequence: Synthetic peptide
STQEFRYMNSQGLLPPKNSIDAFKL

SEQ ID NO: 17262 - protein, 25 aa, Artificial Sequence
  Description of Artificial Sequence: Synthetic peptide
ESPFVMMSAPPAQYELKHGTFTCAS

SEQ ID NO: 17263 - protein, 25 aa, Artificial Sequence
  Description of Artificial Sequence: Synthetic peptide
TNGDFLHFLPRVFSAVGNICYTPSK

SEQ ID NO: 17264 - protein, 25 aa, Artificial Sequence
  Description of Artificial Sequence: Synthetic peptide
KSAFYILPSIISNEKQEILGTVSWN

SEQ ID NO: 17265 - protein, 25 aa, Artificial Sequence
  Description of Artificial Sequence: Synthetic peptide
TLNGLWLDDVVYCPRHVICTSEDML

SEQ ID NO: 17266 - protein, 25 aa, Artificial Sequence
  Description of Artificial Sequence: Synthetic peptide
VSTQEFRYMNSQGLLPPKNSIDAFK

SEQ ID NO: 17267 - protein, 25 aa, Artificial Sequence
  Description of Artificial Sequence: Synthetic peptide
VQQESPFVMMSAPPAQYELKHGTFT

SEQ ID NO: 17268 - protein, 25 aa, Artificial Sequence
  Description of Artificial Sequence: Synthetic peptide
KQATKYLVQQESPFVMMSAPPAQYE

SEQ ID NO: 17269 - protein, 25 aa, Artificial Sequence
  Description of Artificial Sequence: Synthetic peptide
QQESPFVMMSAPPAQYELKHGTFTC

SEQ ID NO: 17270 - protein, 25 aa, Artificial Sequence
  Description of Artificial Sequence: Synthetic peptide
QESPFVMMSAPPAQYELKHGTFTCA

SEQ ID NO: 17271 - protein, 25 aa, Artificial Sequence
  Description of Artificial Sequence: Synthetic peptide
TKYLVQQESPFVMMSAPPAQYELKH

SEQ ID NO: 17272 - protein, 25 aa, Artificial Sequence
  Description of Artificial Sequence: Synthetic peptide
ATKYLVQQESPFVMMSAPPAQYELK

SEQ ID NO: 17273 - protein, 25 aa, Artificial Sequence
  Description of Artificial Sequence: Synthetic peptide
KYLVQQESPFVMMSAPPAQYELKHG

SEQ ID NO: 17274 - protein, 25 aa, Artificial Sequence
  Description of Artificial Sequence: Synthetic peptide
QATKYLVQQESPFVMMSAPPAQYEL

SEQ ID NO: 17275 - protein, 25 aa, Artificial Sequence
  Description of Artificial Sequence: Synthetic peptide
LVQQESPFVMMSAPPAQYELKHGTF

SEQ ID NO: 17276 - protein, 25 aa, Artificial Sequence
  Description of Artificial Sequence: Synthetic peptide
YLVQQESPFVMMSAPPAQYELKHGT

SEQ ID NO: 17277 - protein, 25 aa, Artificial Sequence
  Description of Artificial Sequence: Synthetic peptide
LNGLWLDDVVYCPRHVICTSEDMLN

SEQ ID NO: 17278 - protein, 25 aa, Artificial Sequence
  Description of Artificial Sequence: Synthetic peptide
NGLWLDDVVYCPRHVICTSEDMLNP

SEQ ID NO: 17279 - protein, 25 aa, Artificial Sequence
  Description of Artificial Sequence: Synthetic peptide
LGVYDYLVSTQEFRYMNSQGLLPPK

SEQ ID NO: 17280 - protein, 25 aa, Artificial Sequence
  Description of Artificial Sequence: Synthetic peptide
LWLDDVVYCPRHVICTSEDMLNPNY

SEQ ID NO: 17281 - protein, 25 aa, Artificial Sequence
  Description of Artificial Sequence: Synthetic peptide
KKCKSAFYILPSIISNEKQEILGTV

SEQ ID NO: 17282 - protein, 25 aa, Artificial Sequence
  Description of Artificial Sequence: Synthetic peptide
KCKSAFYILPSIISNEKQEILGTVS

SEQ ID NO: 17283 - protein, 25 aa, Artificial Sequence
  Description of Artificial Sequence: Synthetic peptide
CKSAFYILPSIISNEKQEILGTVSW

SEQ ID NO: 17284 - protein, 25 aa, Artificial Sequence
  Description of Artificial Sequence: Synthetic peptide
DYLVSTQEFRYMNSQGLLPPKNSID

SEQ ID NO: 17285 - protein, 25 aa, Artificial Sequence
  Description of Artificial Sequence: Synthetic peptide
LVSTQEFRYMNSQGLLPPKNSIDAF

SEQ ID NO: 17286 - protein, 25 aa, Artificial Sequence
  Description of Artificial Sequence: Synthetic peptide
YLVSTQEFRYMNSQGLLPPKNSIDA

SEQ ID NO: 17287 - protein, 25 aa, Artificial Sequence
  Description of Artificial Sequence: Synthetic peptide
LDDVVYCPRHVICTSEDMLNPNYED

SEQ ID NO: 17288 - protein, 25 aa, Artificial Sequence
  Description of Artificial Sequence: Synthetic peptide
WLDDVVYCPRHVICTSEDMLNPNYE

SEQ ID NO: 17289 - protein, 25 aa, Artificial Sequence
  Description of Artificial Sequence: Synthetic peptide
GLWLDDVVYCPRHVICTSEDMLNPN

SEQ ID NO: 17290 - protein, 25 aa, Artificial Sequence
  Description of Artificial Sequence: Synthetic peptide
LKKCKSAFYILPSIISNEKQEILGT

SEQ ID NO: 17291 - protein, 25 aa, Artificial Sequence
  Description of Artificial Sequence: Synthetic peptide
VLKKCKSAFYILPSIISNEKQEILG

SEQ ID NO: 17292 - protein, 25 aa, Artificial Sequence
  Description of Artificial Sequence: Synthetic peptide
YDYLVSTQEFRYMNSQGLLPPKNSI

SEQ ID NO: 17293 - protein, 25 aa, Artificial Sequence
  Description of Artificial Sequence: Synthetic peptide
VYDYLVSTQEFRYMNSQGLLPPKNS

SEQ ID NO: 17294 - protein, 25 aa, Artificial Sequence
  Description of Artificial Sequence: Synthetic peptide
GVYDYLVSTQEFRYMNSQGLLPPKN

SEQ ID NO: 17295 - protein, 25 aa, Artificial Sequence
  Description of Artificial Sequence: Synthetic peptide
TLNSLEDKAFQLTPIAVQMTKLATT

SEQ ID NO: 17296 - protein, 25 aa, Artificial Sequence
  Description of Artificial Sequence: Synthetic peptide
ALRLVDPQIQLAVTRMENAVGRDQN

SEQ ID NO: 17297 - protein, 25 aa, Artificial Sequence
  Description of Artificial Sequence: Synthetic peptide
RLVDPQIQLAVTRMENAVGRDQNNV

SEQ ID NO: 17298 - protein, 25 aa, Artificial Sequence
  Description of Artificial Sequence: Synthetic peptide
LRLVDPQIQLAVTRMENAVGRDQNN

SEQ ID NO: 17299 - protein, 25 aa, Artificial Sequence
  Description of Artificial Sequence: Synthetic peptide
PALRLVDPQIQLAVTRMENAVGRDQ

SEQ ID NO: 17300 - protein, 25 aa, Artificial Sequence
  Description of Artificial Sequence: Synthetic peptide
LVDPQIQLAVTRMENAVGRDQNNVG

SEQ ID NO: 17301 - protein, 25 aa, Artificial Sequence
  Description of Artificial Sequence: Synthetic peptide
VDPQIQLAVTRMENAVGRDQNNVGP

SEQ ID NO: 17302 - protein, 25 aa, Artificial Sequence
  Description of Artificial Sequence: Synthetic peptide
EDKAFQLTPIAVQMTKLATTEELPD

SEQ ID NO: 17303 - protein, 25 aa, Artificial Sequence
  Description of Artificial Sequence: Synthetic peptide
VGPKVYPIILRLGSPLSLNMARKTL

SEQ ID NO: 17304 - protein, 25 aa, Artificial Sequence
  Description of Artificial Sequence: Synthetic peptide
NVGPKVYPIILRLGSPLSLNMARKT

SEQ ID NO: 17305 - protein, 25 aa, Artificial Sequence
  Description of Artificial Sequence: Synthetic peptide
QNNVGPKVYPIILRLGSPLSLNMAR

SEQ ID NO: 17306 - protein, 25 aa, Artificial Sequence
  Description of Artificial Sequence: Synthetic peptide
DPQIQLAVTRMENAVGRDQNNVGPK

SEQ ID NO: 17307 - protein, 25 aa, Artificial Sequence
  Description of Artificial Sequence: Synthetic peptide
NNVGPKVYPIILRLGSPLSLNMARK

SEQ ID NO: 17308 - protein, 25 aa, Artificial Sequence
  Description of Artificial Sequence: Synthetic peptide
KTLNSLEDKAFQLTPIAVQMTKLAT

SEQ ID NO: 17309 - protein, 25 aa, Artificial Sequence
  Description of Artificial Sequence: Synthetic peptide
NSLEDKAFQLTPIAVQMTKLATTEE

SEQ ID NO: 17310 - protein, 25 aa, Artificial Sequence
  Description of Artificial Sequence: Synthetic peptide
LNSLEDKAFQLTPIAVQMTKLATTE

SEQ ID NO: 17311 - protein, 25 aa, Artificial Sequence
  Description of Artificial Sequence: Synthetic peptide
LEDKAFQLTPIAVQMTKLATTEELP

SEQ ID NO: 17312 - protein, 25 aa, Artificial Sequence
  Description of Artificial Sequence: Synthetic peptide
SLEDKAFQLTPIAVQMTKLATTEEL

SEQ ID NO: 17313 - protein, 25 aa, Artificial Sequence
  Description of Artificial Sequence: Synthetic peptide
PLSLNMARKTLNSLEDKAFQLTPIA

SEQ ID NO: 17314 - protein, 25 aa, Artificial Sequence
  Description of Artificial Sequence: Synthetic peptide
LSLNMARKTLNSLEDKAFQLTPIAV

SEQ ID NO: 17315 - protein, 25 aa, Artificial Sequence
  Description of Artificial Sequence: Synthetic peptide
GPKVYPIILRLGSPLSLNMARKTLN

SEQ ID NO: 17316 - protein, 25 aa, Artificial Sequence
  Description of Artificial Sequence: Synthetic peptide
MARKTLNSLEDKAFQLTPIAVQMTK

SEQ ID NO: 17317 - protein, 25 aa, Artificial Sequence
  Description of Artificial Sequence: Synthetic peptide
ARKTLNSLEDKAFQLTPIAVQMTKL

SEQ ID NO: 17318 - protein, 25 aa, Artificial Sequence
  Description of Artificial Sequence: Synthetic peptide
RDQNNVGPKVYPIILRLGSPLSLNM

SEQ ID NO: 17319 - protein, 25 aa, Artificial Sequence
  Description of Artificial Sequence: Synthetic peptide
GRDQNNVGPKVYPIILRLGSPLSLN

SEQ ID NO: 17320 - protein, 25 aa, Artificial Sequence
  Description of Artificial Sequence: Synthetic peptide
DQNNVGPKVYPIILRLGSPLSLNMA

SEQ ID NO: 17321 - protein, 25 aa, Artificial Sequence
  Description of Artificial Sequence: Synthetic peptide
HPALRLVDPQIQLAVTRMENAVGRD

SEQ ID NO: 17322 - protein, 25 aa, Artificial Sequence
  Description of Artificial Sequence: Synthetic peptide
LNMARKTLNSLEDKAFQLTPIAVQM

SEQ ID NO: 17323 - protein, 25 aa, Artificial Sequence
  Description of Artificial Sequence: Synthetic peptide
NMARKTLNSLEDKAFQLTPIAVQMT

SEQ ID NO: 17324 - protein, 25 aa, Artificial Sequence
  Description of Artificial Sequence: Synthetic peptide
SLNMARKTLNSLEDKAFQLTPIAVQ

SEQ ID NO: 17325 - protein, 25 aa, Artificial Sequence
  Description of Artificial Sequence: Synthetic peptide
LTPIAVQMTKLATTEELPDEFVVVT

SEQ ID NO: 17326 - protein, 25 aa, Artificial Sequence
  Description of Artificial Sequence: Synthetic peptide
KAFQLTPIAVQMTKLATTEELPDEF

SEQ ID NO: 17327 - protein, 25 aa, Artificial Sequence
  Description of Artificial Sequence: Synthetic peptide
FQLTPIAVQMTKLATTEELPDEFVV

SEQ ID NO: 17328 - protein, 25 aa, Artificial Sequence
  Description of Artificial Sequence: Synthetic peptide
AFQLTPIAVQMTKLATTEELPDEFV

SEQ ID NO: 17329 - protein, 25 aa, Artificial Sequence
  Description of Artificial Sequence: Synthetic peptide
TPIAVQMTKLATTEELPDEFVVVTV

SEQ ID NO: 17330 - protein, 25 aa, Artificial Sequence
  Description of Artificial Sequence: Synthetic peptide
QLTPIAVQMTKLATTEELPDEFVVV

SEQ ID NO: 17331 - protein, 25 aa, Artificial Sequence
  Description of Artificial Sequence: Synthetic peptide
DKAFQLTPIAVQMTKLATTEELPDE

SEQ ID NO: 17332 - protein, 25 aa, Artificial Sequence
  Description of Artificial Sequence: Synthetic peptide
VGRDQNNVGPKVYPIILRLGSPLSL

SEQ ID NO: 17333 - protein, 25 aa, Artificial Sequence
  Description of Artificial Sequence: Synthetic peptide
AVGRDQNNVGPKVYPIILRLGSPLS

SEQ ID NO: 17334 - protein, 25 aa, Artificial Sequence
  Description of Artificial Sequence: Synthetic peptide
RKTLNSLEDKAFQLTPIAVQMTKLA

SEQ ID NO: 17335 - protein, 25 aa, Artificial Sequence
  Description of Artificial Sequence: Synthetic peptide
MHPALRLVDPQIQLAVTRMENAVGR

SEQ ID NO: 17336 - protein, 25 aa, Artificial Sequence
  Description of Artificial Sequence: Synthetic peptide
EMHPALRLVDPQIQLAVTRMENAVG

SEQ ID NO: 17337 - protein, 25 aa, Artificial Sequence
  Description of Artificial Sequence: Synthetic peptide
GSPLSLNMARKTLNSLEDKAFQLTP

SEQ ID NO: 17338 - protein, 25 aa, Artificial Sequence
  Description of Artificial Sequence: Synthetic peptide
LRLGSPLSLNMARKTLNSLEDKAFQ

SEQ ID NO: 17339 - protein, 25 aa, Artificial Sequence
  Description of Artificial Sequence: Synthetic peptide
LGSPLSLNMARKTLNSLEDKAFQLT

SEQ ID NO: 17340 - protein, 25 aa, Artificial Sequence
  Description of Artificial Sequence: Synthetic peptide
RLGSPLSLNMARKTLNSLEDKAFQL

SEQ ID NO: 17341 - protein, 25 aa, Artificial Sequence
  Description of Artificial Sequence: Synthetic peptide
SPLSLNMARKTLNSLEDKAFQLTPI

SEQ ID NO: 17342 - protein, 25 aa, Artificial Sequence
  Description of Artificial Sequence: Synthetic peptide
MDPKISEMHPALRLVDPQIQLAVTR

SEQ ID NO: 17343 - protein, 25 aa, Artificial Sequence
  Description of Artificial Sequence: Synthetic peptide
VYPIILRLGSPLSLNMARKTLNSLE

SEQ ID NO: 17344 - protein, 25 aa, Artificial Sequence
  Description of Artificial Sequence: Synthetic peptide
KVYPIILRLGSPLSLNMARKTLNSL

SEQ ID NO: 17345 - protein, 25 aa, Artificial Sequence
  Description of Artificial Sequence: Synthetic peptide
PKVYPIILRLGSPLSLNMARKTLNS

SEQ ID NO: 17346 - protein, 25 aa, Artificial Sequence
  Description of Artificial Sequence: Synthetic peptide
DPKISEMHPALRLVDPQIQLAVTRM

SEQ ID NO: 17347 - protein, 25 aa, Artificial Sequence
  Description of Artificial Sequence: Synthetic peptide
YPIILRLGSPLSLNMARKTLNSLED

SEQ ID NO: 17348 - protein, 25 aa, Artificial Sequence
  Description of Artificial Sequence: Synthetic peptide
SEMHPALRLVDPQIQLAVTRMENAV

SEQ ID NO: 17349 - protein, 25 aa, Artificial Sequence
  Description of Artificial Sequence: Synthetic peptide
PIAVQMTKLATTEELPDEFVVVTVK

SEQ ID NO: 17350 - protein, 14 aa, Unknown
  Description of Unknown: tetanus toxoid sequence
QYIKANSKFIGITE

SEQ ID NO: 17351 - protein, 21 aa, Unknown
  Description of Unknown: Plasmodium falciparum sequence
DIEKKIAKMEKASSVFNVVNS

SEQ ID NO: 17352 - protein, 16 aa, Streptococcus sp.
GAVDSILGGVATYGAA

SEQ ID NO: 17353 - protein, 13 aa, Artificial Sequence
  Description of Artificial Sequence: Synthetic peptide
  MOD_RES (1)..(1): D- or L-Ala
  MOD_RES (3)..(3): cyclohexyl alanine, phenylalanine, or tyrosine
  MOD_RES (13)..(13): D- or L-Ala
AKXVWANTLKAAA

SEQ ID NO: 17354 - RNA, 200 nt, Artificial Sequence
  Description of Artificial Sequence: Synthetic polynucleotide
  misc_feature (1)..(200): This sequence may encompass 50-200 nucleotides
aaaaaaaaaaaaaaaaaaaaaaaaaaaaaaaaaaaaaaaaaaaaaaaaaaaaaaaaaaaaaaaaaaaaaaaaaaaaaaaaaaaaaaaaaaaaaaaaaaaaaaaaaaaaaaaaaaaaaaaaaaaaaaaaaaaaaaaaaaaaaaaaaaaaaaaaaaaaaaaaaaaaaaaaaaaaaaaaaaaaaaaaaaaaaaaaaaaaaaaa

SEQ ID NO: 17355 - RNA, 200 nt, Artificial Sequence; identical to SEQ ID NO: 17354
  Description of Artificial Sequence: Synthetic polynucleotide
  See specification as filed for detailed description of substitutions and preferred embodiments

SEQ ID NO: 17356 - RNA, 180 nt, Artificial Sequence
  Description of Artificial Sequence: Synthetic polynucleotide
  See specification as filed for detailed description of substitutions and preferred embodiments
aaaaaaaaaaaaaaaaaaaaaaaaaaaaaaaaaaaaaaaaaaaaaaaaaaaaaaaaaaaaaaaaaaaaaaaaaaaaaaaaaaaaaaaaaaaaaaaaaaaaaaaaaaaaaaaaaaaaaaaaaaaaaaaaaaaaaaaaaaaaaaaaaaaaaaaaaaaaaaaaaaaaaaaaaaaaaaaaaaaa

SEQ ID NO: 17357 - RNA, 150 nt, Artificial Sequence
  Description of Artificial Sequence: Synthetic polynucleotide
  See specification as filed for detailed description of substitutions and preferred embodiments
aaaaaaaaaaaaaaaaaaaaaaaaaaaaaaaaaaaaaaaaaaaaaaaaaaaaaaaaaaaaaaaaaaaaaaaaaaaaaaaaaaaaaaaaaaaaaaaaaaaaaaaaaaaaaaaaaaaaaaaaaaaaaaaaaaaaaaaaaaaaaaaaaaaaaa

SEQ ID NO: 17358 - RNA, 120 nt, Artificial Sequence
  Description of Artificial Sequence: Synthetic polynucleotide
  See specification as filed for detailed description of substitutions and preferred embodiments
aaaaaaaaaaaaaaaaaaaaaaaaaaaaaaaaaaaaaaaaaaaaaaaaaaaaaaaaaaaaaaaaaaaaaaaaaaaaaaaaaaaaaaaaaaaaaaaaaaaaaaaaaaaaaaaaaaaaaaaa

SEQ ID NO: 17359 - RNA, 4283 nt, Artificial Sequence
  Description of Artificial Sequence: Synthetic polynucleotide
agaauaaacuaguauucuucugguccccacagacucagagagaacccgccaccauguuuguguuucuugugcugcugccucuugugucuucucagugugugaauuugacaacaagaacacagcugccaccagcuuauacaaauucuuuuaccagaggaguguauuauccugauaaaguguuuagaucuucugugcugcacagcacacaggaccuguuucugccauuuuuuagcaaugugacaugguuucaugcaauucaugugucuggaacaaauggaacaaaaagauuugauaauccugugcugccuuuuaaugauggaguguauuuugcuucaacagaaaagucaaauauuauuagaggauggauuuuuggaacaacacuggauucuaaaacacagucucugcugauugugaauaaugcaacaaauguggugauuaaagugugugaauuucaguuuuguaaugauccuuuucugggaguguauuaucacaaaaauaauaaaucuuggauggaaucugaauuuagaguguauuccucugcaaauaauuguacauuugaauaugugucucagccuuuucugauggaucuggaaggaaaacagggcaauuuuaaaaaucugagagaauuuguguuuaaaaauauugauggauauuuuaaaauuuauucuaaacacacaccaauuaauuuagugagagaucugccucagggauuuucugcucuggaaccucugguggaucugccaauuggcauuaauauuacaagauuucagacacugcuggcucugcacagaucuuaucugacaccuggagauucuucuucuggauggacagccggagcugcagcuuauuaugugggcuaucugcagccaagaacauuucugcugaaauauaaugaaaauggaacaauuacagaugcuguggauugugcucuggauccucugucugaaacaaaauguacauuaaaaucuuuuacaguggaaaaaggcauuuaucagacaucuaauuuuagagugcagccaacagaaucuauugugagauuuccaaauauuacaaaucuguguccauuuggagaaguguuuaaugcaacaagauuugcaucuguguaugcauggaauagaaaaagaauuucuaauuguguggcugauuauucugugcuguauaauagugcuucuuuuuccacauuuaaauguuauggagugucuccaacaaaauuaaaugauuuauguuuuacaaauguguaugcugauucuuuugugaucagaggugaugaagugagacagauugcccccggacagacaggaaaaauugcugauuacaauuacaaacugccugaugauuuuacaggaugugugauugcuuggaauucuaauaauuuagauucuaaagugggaggaaauuacaauuaucuguacagacuguuuagaaaaucaaaucugaaaccuuuugaaagagauauuucaacagaaauuuaucaggcuggaucaacaccuuguaauggaguggaaggauuuaauuguuauuuuccauuacagagcuauggauuucagccaaccaauggugugggauaucagccauauagagugguggugcugucuuuugaacugcugcaugcaccugcaacaguguguggaccuaaaaaaucuacaaauuuagugaaaaauaaaugugugaauuuuaauuuuaauggauuaacaggaacaggagugcugacagaaucuaauaaaaaauuucugccuuuucagcaguuuggcagagauauugcagauaccacagaugcagugagagauccucagacauuagaaauucuggauauuacaccuuguucuuuugggggugugucugugauuacaccuggaacaaauacaucuaaucagguggcugugcuguaucaggaugugaauuguacagaagugccaguggcaauucaugcagaucagcugacaccaacauggagaguguauucuacaggaucuaauguguuucagacaagagcaggaugucugauuggagcagaacaugugaauaauucuuaugaaugugauauuccaauuggagcaggcauuugugcaucuuaucagacacagacaaauuccccaaggagagcaagaucuguggcaucucagucuauuauugcauacaccaugucucugggagcagaaaauucuguggcauauucuaauaauucuauugcuauuccaacaaauuuuaccauuucugugacaacagaaauuuuaccugugucuaugacaaaaacaucuguggauuguaccauguacauuuguggagauucuacagaauguucuaaucugcugcugcaguauggaucuuuuuguacacagcugaauagagcuuuaacaggaauugcuguggaacaggauaaaaauacacaggaaguguuugcucaggugaaacagauuuacaaaacaccaccaauuaaagauuuuggaggauuuaauuuuagccagauucugccugauccuucuaaaccuucuaaaagaucuuuuauugaagaucugcuguuuaauaaagugacacuggcagaugcaggauuuauuaaacaguauggagauugccugggugauauugcugcaagagaucugauuugugcucagaaauuuaauggacugacagugcugccuccucugcugacagaugaaaugauugcucaguacacaucugcuuuacuggcuggaacaauuacaagcggauggacauuuggagcuggagcugcucugcagauuccuuuugcaaugcagauggcuuacagauuuaauggaauuggagugacacagaauguguuauaugaaaaucagaaacugauugcaaaucaguuuaauucugcaauuggcaaaauucaggauucucugucuucuacagcuucugcucugggaaaacugcaggauguggugaaucagaaugcacaggcacugaauacucuggugaaacagcugucuagcaauuuuggggcaauuucuucugugcugaaugauauucugucuagacuggauccuccugaagcugaagugcagauugauagacugaucacaggaagacugcagucucugcagacuuaugugacacagcagcugauuagagcugcugaaauuagagcuucugcuaaucuggcugcuacaaaaaugucugaaugugugcugggacagucaaaaagaguggauuuuuguggaaaaggauaucaucugaugucuuuuccacagucugcuccacauggagugguguuuuuacaugugacauaugugccagcacaggaaaagaauuuuaccacagcaccagcaauuugucaugauggaaaagcacauuuuccaagagaaggaguguuugugucuaauggaacacauugguuugugacacagagaaauuuuuaugaaccucagauuauuacaacagauaauacauuugugucaggaaauugugauguggugauuggaauugugaauaauacaguguaugauccacugcagccagaacuggauucuuuuaaagaagaacuggauaaauauuuuaaaaaucacacaucuccugauguggauuuaggagauauuucuggaaucaaugcaucuguggugaauauucagaaagaaauugauagacugaaugaaguggccaaaaaucugaaugaaucucugauugaucugcaggaacuuggaaaauaugaacaguacauuaaauggccuugguacauuuggcuuggauuuauugcaggauuaauugcaauugugauggugacaauuauguuauguuguaugacaucauguuguucuuguuuaaaaggauguuguucuuguggaagcuguuguaaauuugaugaagaugauucugaaccuguguuaaaaggagugaaauugcauuacacaugaugacucgagcugguacugcaugcacgcaaugcuagcugccccuuucccguccuggguaccccgagucucccccgaccucgggucccagguaugcucccaccuccaccugccccacucaccaccucugcuaguuccagacaccucccaagcacgcagcaaugcagcucaaaacgcuuagccuagccacacccccacgggaaacagcagugauuaaccuuuagcaauaaacgaaaguuuaacuaagcuauacuaaccccaggguuggucaauuucgugccagccacacccuggagcuagcaaaaaaaaaaaaaaaaaaaaaaaaaaaaaagcauaugacuaaaaaaaaaaaaaaaaaaaaaaaaaaaaaaaaaaaaaaaaaaaaaaaaaaaaaaaaaaaaaaaaaaaaaa

SEQ ID NO: 17360 - protein, 1273 aa, Artificial Sequence
  Description of Artificial Sequence: Synthetic polypeptide
MFVFLVLLPLVSSQCVNLTTRTQLPPAYTNSFTRGVYYPDKVFRSSVLHSTQDLFLPFFSNVTWFHAIHVSGTNGTKRFDNPVLPFNDGVYFASTEKSNIIRGWIFGTTLDSKTQSLLIVNNATNVVIKVCEFQFCNDPFLGVYYHKNNKSWMESEFRVYSSANNCTFEYVSQPFLMDLEGKQGNFKNLREFVFKNIDGYFKIYSKHTPINLVRDLPQGFSALEPLVDLPIGINITRFQTLLALHRSYLTPGDSSSGWTAGAAAYYVGYLQPRTFLLKYNENGTITDAVDCALDPLSETKCTLKSFTVEKGIYQTSNFRVQPTESIVRFPNITNLCPFGEVFNATRFASVYAWNRKRISNCVADYSVLYNSASFSTFKCYGVSPTKLNDLCFTNVYADSFVIRGDEVRQIAPGQTGKIADYNYKLPDDFTGCVIAWNSNNLDSKVGGNYNYLYRLFRKSNLKPFERDISTEIYQAGSTPCNGVEGFNCYFPLQSYGFQPTNGVGYQPYRVVVLSFELLHAPATVCGPKKSTNLVKNKCVNFNFNGLTGTGVLTESNKKFLPFQQFGRDIADTTDAVRDPQTLEILDITPCSFGGVSVITPGTNTSNQVAVLYQDVNCTEVPVAIHADQLTPTWRVYSTGSNVFQTRAGCLIGAEHVNNSYECDIPIGAGICASYQTQTNSPRRARSVASQSIIAYTMSLGAENSVAYSNNSIAIPTNFTISVTTEILPVSMTKTSVDCTMYICGDSTECSNLLLQYGSFCTQLNRALTGIAVEQDKNTQEVFAQVKQIYKTPPIKDFGGFNFSQILPDPSKPSKRSFIEDLLFNKVTLADAGFIKQYGDCLGDIAARDLICAQKFNGLTVLPPLLTDEMIAQYTSALLAGTITSGWTFGAGAALQIPFAMQMAYRFNGIGVTQNVLYENQKLIANQFNSAIGKIQDSLSSTASALGKLQDVVNQNAQALNTLVKQLSSNFGAISSVLNDILSRLDPPEAEVQIDRLITGRLQSLQTYVTQQLIRAAEIRASANLAATKMSECVLGQSKRVDFCGKGYHLMSFPQSAPHGVVFLHVTYVPAQEKNFTTAPAICHDGKAHFPREGVFVSNGTHWFVTQRNFYEPQIITTDNTFVSGNCDVVIGIVNNTVYDPLQPELDSFKEELDKYFKNHTSPDVDLGDISGINASVVNIQKEIDRLNEVAKNLNESLIDLQELGKYEQYIKWPWYIWLGFIAGLIAIVMVTIMLCCMTSCCSCLKGCCSCGSCCKFDEDDSEPVLKGVKLHYT

SEQ ID NO: 17361 - RNA, 4283 nt, Artificial Sequence
  Description of Artificial Sequence: Synthetic polynucleotide
agaauaaacuaguauucuucugguccccacagacucagagagaacccgccaccauguucguguuccuggugcugcugccucugguguccagccagugugugaaccugaccaccagaacacagcugccuccagccuacaccaacagcuuuaccagaggcguguacuaccccgacaagguguucagauccagcgugcugcacucuacccaggaccuguuccugccuuucuucagcaacgugaccugguuccacgccauccacguguccggcaccaauggcaccaagagauucgacaaccccgugcugcccuucaacgacgggguguacuuugccagcaccgagaaguccaacaucaucagaggcuggaucuucggcaccacacuggacagcaagacccagagccugcugaucgugaacaacgccaccaacguggucaucaaagugugcgaguuccaguucugcaacgaccccuuccugggcgucuacuaccacaagaacaacaagagcuggauggaaagcgaguuccggguguacagcagcgccaacaacugcaccuucgaguacgugucccagccuuuccugauggaccuggaaggcaagcagggcaacuucaagaaccugcgcgaguucguguuuaagaacaucgacggcuacuucaagaucuacagcaagcacaccccuaucaaccucgugcgggaucugccucagggcuucucugcucuggaaccccugguggaucugcccaucggcaucaacaucacccgguuucagacacugcuggcccugcacagaagcuaccugacaccuggcgauagcagcagcggauggacagcuggugccgccgcuuacuaugugggcuaccugcagccuagaaccuuccugcugaaguacaacgagaacggcaccaucaccgacgccguggauugugcucuggauccucugagcgagacaaagugcacccugaaguccuucaccguggaaaagggcaucuaccagaccagcaacuuccgggugcagcccaccgaauccaucgugcgguuccccaauaucaccaaucugugccccuucggcgagguguucaaugccaccagauucgccucuguguacgccuggaaccggaagcggaucagcaauugcguggccgacuacuccgugcuguacaacuccgccagcuucagcaccuucaagugcuacggcguguccccuaccaagcugaacgaccugugcuucacaaacguguacgccgacagcuucgugauccggggagaugaagugcggcagauugccccuggacagacaggcaagaucgccgacuacaacuacaagcugcccgacgacuucaccggcugugugauugccuggaacagcaacaaccuggacuccaaagucggcggcaacuacaauuaccuguaccggcuguuccggaaguccaaucugaagcccuucgagcgggacaucuccaccgagaucuaucaggccggcagcaccccuuguaacggcguggaaggcuucaacugcuacuucccacugcaguccuacggcuuucagcccacaaauggcgugggcuaucagcccuacagagugguggugcugagcuucgaacugcugcaugccccugccacagugugcggcccuaagaaaagcaccaaucucgugaagaacaaaugcgugaacuucaacuucaacggccugaccggcaccggcgugcugacagagagcaacaagaaguuccugccauuccagcaguuuggccgggauaucgccgauaccacagacgccguuagagauccccagacacuggaaauccuggacaucaccccuugcagcuucggcggagugucugugaucaccccuggcaccaacaccagcaaucagguggcagugcuguaccaggacgugaacuguaccgaagugcccguggccauucacgccgaucagcugacaccuacauggcggguguacuccaccggcagcaauguguuucagaccagagccggcugucugaucggagccgagcacgugaacaauagcuacgagugcgacauccccaucggcgcuggaaucugcgccagcuaccagacacagacaaacagcccucggagagccagaagcguggccagccagagcaucauugccuacacaaugucucugggcgccgagaacagcguggccuacuccaacaacucuaucgcuauccccaccaacuucaccaucagcgugaccacagagauccugccuguguccaugaccaagaccagcguggacugcaccauguacaucugcggcgauuccaccgagugcuccaaccugcugcugcaguacggcagcuucugcacccagcugaauagagcccugacagggaucgccguggaacaggacaagaacacccaagagguguucgcccaagugaagcagaucuacaagaccccuccuaucaaggacuucggcggcuucaauuucagccagauucugcccgauccuagcaagcccagcaagcggagcuucaucgaggaccugcuguucaacaaagugacacuggccgacgccggcuucaucaagcaguauggcgauugucugggcgacauugccgccagggaucugauuugcgcccagaaguuuaacggacugacagugcugccuccucugcugaccgaugagaugaucgcccaguacacaucugcccugcuggccggcacaaucacaagcggcuggacauuuggagcaggcgccgcucugcagauccccuuugcuaugcagauggccuaccgguucaacggcaucggagugacccagaaugugcuguacgagaaccagaagcugaucgccaaccaguucaacagcgccaucggcaagauccaggacagccugagcagcacagcaagcgcccugggaaagcugcaggacguggucaaccagaaugcccaggcacugaacacccuggucaagcagcuguccuccaacuucggcgccaucagcucugugcugaacgauauccugagcagacuggacccuccugaggccgaggugcagaucgacagacugaucacaggcagacugcagagccuccagacauacgugacccagcagcugaucagagccgccgagauuagagccucugccaaucuggccgccaccaagaugucugagugugugcugggccagagcaagagaguggacuuuugcggcaagggcuaccaccugaugagcuucccucagucugccccucacggcgugguguuucugcacgugacauaugugcccgcucaagagaagaauuucaccaccgcuccagccaucugccacgacggcaaagcccacuuuccuagagaaggcguguucguguccaacggcacccauugguucgugacacagcggaacuucuacgagccccagaucaucaccaccgacaacaccuucgugucuggcaacugcgacgucgugaucggcauugugaacaauaccguguacgacccucugcagcccgagcuggacagcuucaaagaggaacuggacaaguacuuuaagaaccacacaagccccgacguggaccugggcgauaucagcggaaucaaugccagcgucgugaacauccagaaagagaucgaccggcugaacgagguggccaagaaucugaacgagagccugaucgaccugcaagaacuggggaaguacgagcaguacaucaaguggcccugguacaucuggcugggcuuuaucgccggacugauugccaucgugauggucacaaucaugcuguguugcaugaccagcugcuguagcugccugaagggcuguuguagcuguggcagcugcugcaaguucgacgaggacgauucugagcccgugcugaagggcgugaaacugcacuacacaugaugacucgagcugguacugcaugcacgcaaugcuagcugccccuuucccguccuggguaccccgagucucccccgaccucgggucccagguaugcucccaccuccaccugccccacucaccaccucugcuaguuccagacaccucccaagcacgcagcaaugcagcucaaaacgcuuagccuagccacacccccacgggaaacagcagugauuaaccuuuagcaauaaacgaaaguuuaacuaagcuauacuaaccccaggguuggucaauuucgugccagccacacccuggagcuagcaaaaaaaaaaaaaaaaaaaaaaaaaaaaaagcauaugacuaaaaaaaaaaaaaaaaaaaaaaaaaaaaaaaaaaaaaaaaaaaaaaaaaaaaaaaaaaaaaaaaaaaaaa

SEQ ID NO: 17362 - protein, 26 aa, Artificial Sequence
  Description of Artificial Sequence: Synthetic peptide
MRVMAPRTLILLLSGALALTETWAGS

SEQ ID NO: 17363 - protein, 55 aa, Artificial Sequence
  Description of Artificial Sequence: Synthetic polypeptide
IVGIVAGLAVLAVVVIGAVVATVMCRRKSSGGKGGSYSQAASSDSAQGSDVSLTA

SEQ ID NO: 17364 - DNA, 4107 bp, Artificial Sequence
  Description of Artificial Sequence: Synthetic polynucleotide
atgagggtaatggctccgcgcacccttatattgcttctgtctggggcgcttgcgcttacggaaacttgggcagggtctggtgggtctggaggtggtggttccggcgggagtgataatggacctcagaaccaacgcaacgcacccaggatcacatttggtgggccatccgactccactggcagcaaccaaaacggtgaacgaagtggcgcgagatccaagcagcgccgccctcaaggtttgccgaataacacagccagctggttcactgccttgactcagcatggcaaggaagatttgaaattcccacgaggacagggtgtccctataaatacgaattccagtcccgatgatcagatcggttattatagaagagctacaaggcgaatccggggcggggatggcaagatgaaagacctgagcccgcgctggtatttctattacctgggaactggacctgaagcgggcctcccttatggtgcgaataaagacggaataatctgggtggctacggaaggggccctgaacacgcccaaggatcacatcggcacacgcaatccggcgaacaatgccgcgatagtgctgcagctgccacaaggcaccacactgccaaaggggttttacgcagaaggctccagaggtgggtcacaagcctcttctcgatcctcttcccggagcagaaatagctcacgaaactccaccccgggcagttccagaggcacaagtcctgctcgcatggcaggtaatggaggtgacgccgctctcgcgcttcttctcctcgacagactgaatcagcttgagagtaaaatgagtggaaagggacagcagcaacaggggcaaacagtgaccaaaaaatcagctgcggaagccagcaagaagccgcgccagaaacggacagcgactaaagcctacaatgttacccaagccttcggccgcagagggccggagcaaactcagggcaacttcggcgatcaggaactgatccgccagggaacagattataaacattggccccaaatcgcacaatttgcaccctccgcgtctgcgttcttcggcatgagccggattggtatggaagtaacaccgagcggcacctggcttacatatacaggcgcgattaaattggatgacaaggatcccaattttaaggaccaagtgatattgctcaacaaacatattgatgcgtataagacttttcctcctactgaaccaaagaaggataagaaaaaaaaggctgatgaaacacaagctcttcctcaacgccagaaaaagcaacagacagttaccttgctcccggcggccgatcttgatgatttttccaagcagctgcaacagtctatgtcatcagccgactctacccaagcaggcggttcaggtggcggcggttctggtggcgaccctaagatatccgaaatgcaccccgcactcagactggtagacccccaaatacaactggcggttacacggatggagaacgcggttggcagggaccagaataacgtggggccaaaggtgtatcctatcatcctcagattgggtagtcccctcagcttgaatatggctagaaaaacactgaattcattggaagacaaggcgttccaactgacaccgattgcggtgcagatgacaaagctcgctacaaccgaggaactcccagacgagtttgtagtagtcacagtcaagggtggctcaggcggcggaggctcaggtggataccatttttttcatacgacggatccatcttttctcggccgatatatgagcgcgctcttcgcagacgatctgaatcagctcacgggataccacacagacttcagtagtgaaattatcggttatcagttgatgtgccagccgatattgttggctgaggctgaacttgctaagaatgtctccctcatcttggggacagtcagctggaaccttaaacgccgctacttgctgtctgcgggtatctttggggctattacggatgtattttacaaagaaaacagctataaagtaccgaccgacaattacatcacgacttatgcacgcatggcggcaccaaaggaaatcatatttcttgagggggaaactctgttcggagacgatacagtaatagaagtcgctattatacttgcttcattttcagccagtactcgacgcatggctatggtgaccaataatactttcacgctgaaggttcctcatgtgggcgaaatccccgtcgcctatcgcaaggtcctgctcaagactattcaacctcgcgttgaaaagtaccttttcgatgaaagcggggaatttaaactcagcgaagtgggccctgaacactcactcgcagaatattatattttctttgcctccttttattataaacggaatggcggcggctctggcggaggtgggtctggtggcgatctctttatgcggatctttacaatagggaccgttacattgaagcaaggggaaatcaaggacgccacaccgtccgatttcgttagagcaaccgccacgattcctatccaggcatccttgcccttcgggtggctgatagtaggtgtagcactccttgcagtctttcaaagcgcatccaaaatcattaccctcaagaaacgctggcagcttgccctttctaagggagtacatttcgtatgtaatctgttgctcctgttcgttacagtttatagccatctcttgctcgttgccgctgggctggaagccccatttttgtacctgtacgcccttgtgtattttcttcaaagcataaatttcgtgaggattatcatgcgcctctggctgtgctggaaatgccgctcaaaaaatccacttctttatgacgcaaactattttctctgttggcatacaaattgttacgattattgtataccttacaacagtgtgacgtcctccatagtcatcaccagcggagatggtacaacgtcacccatttctgagcacgactaccaaataggcggctatacggagaagtgggaatctggtgtaaaagattgcgtggtgcttcactcttattttacttcagattactaccagctttatagcactcaactttctaccgatacaggagtggaacacgtcacattttttatatacaacaagattgtcgatgaacccgaagaacacgtgcaaatacatacaatcgacggctcctcaggagtcgtcaatccagtcatggaaccaatctacgatgagccgacaactaccactagtgtaccgctcgggggaagcgggggcggaggtagcggcggagcagacagtaatggtactataactgtggaggagctcaagaagctccttgagcaatggaatctggtcataggttttctgtttcttacctggatatgccttcttcagttcgcctatgcgaatcgcaaccgcttcctgtacatcataaagctcatattcctctggctgctctggccggttactcttgcctgttttgttcttgctgctgtataccgcattaattggataacggggggaatagcgatcgcgatggcatgcttggtgggattgatgtggctgagctactttatagcgtcatttaggctttttgcgaggactagatccatgtggtcctttaatcccgaaactaacattcttctcaatgtaccgttgcatggaactattttgactagaccccttctcgagagtgagctggtgataggagccgtgatactcaggggtcatctccggattgccggtcaccatttgggtagatgtgacataaaagatctcccaaaggaaattacggtagctacgtctcgaaccctttcatactacaaactcggtgctagccagcgagtggctggggatagcggcttcgcggcgtattctcgctacagaattggaaactacaagttgaatacggaccactcatcaagtagcgataacattgcactgcttgtgcagggtggtagtctcggggggggcggatccggtatcgtgggcatagttgcgggtctcgctgtgctggctgtggtcgtgatcggcgcggtcgtagctaccgtgatgtgtaggcggaaaagcagtggtggtaaaggtggatcatatagtcaggctgcatcatctgattccgctcaaggaagcgacgtcagcctgacagcttgataa

SEQ ID NO: 17365 - DNA, 4107 bp, Artificial Sequence
  Description of Artificial Sequence: Synthetic polynucleotide
atgcgagtcatggcgccgcgcaccctgatacttctgcttagcggcgctttggccctcaccgagacatgggctggcagcggtggttctggaggcggaggatcaggcggagcggacagcaatggcacgatcactgtggaggagctcaaaaaacttttggaacaatggaatttggtaattggtttcttgtttcttacttggatatgcctgcttcagttcgcctatgcgaacagaaatagatttttgtatatcattaaattgatatttctttggttgctttggcctgttactctggcttgtttcgtcctcgctgcggtttatcggataaattggattacgggtggaatcgcaattgccatggcctgtctggtcggtctgatgtggctttcctacttcatagcatcatttaggctgttcgcgagaacgcgaagcatgtggagtttcaaccccgagacgaatatccttttgaacgtgcctcttcatggcactattctcactcgacctctgcttgaatccgagctcgtcatcggcgcggtaatcctccggggtcatctgcggatcgcaggtcaccacctcgggcggtgtgatatcaaggatcttccgaaagaaattaccgtagctacttcacgcacactcagctactacaagctgggtgcttcacaaagagtcgccggtgattctggtttcgctgcgtatagcaggtaccgaataggaaattacaagctcaataccgatcattcctccagctcagataacatagccctgcttgtgcaagggggatccggaggaggaggttcaggcggtgacttgtttatgaggatctttaccatcggaacagtgacactcaaacaaggggaaataaaggacgccactccgtcagactttgttagagcaacagcgactattccgattcaagccagccttcctttcgggtggctcatagtgggcgtcgcattgctggcggtgtttcagagtgcgagtaagatcataaccctcaaaaagcggtggcagttggcgttgtctaaaggggtacattttgtctgcaaccttctgctcctgttcgtaacagtttattctcacctgctgttggttgcggccggtctggaggccccatttctttatctttacgcacttgtttatttccttcaatccataaatttcgttcggatcatcatgagattgtggctctgctggaagtgcagatccaaaaaccctctcctctacgacgcgaattatttcttgtgttggcacacaaattgctatgactattgcataccgtataactccgtcacttcttcaatcgtaatcacctcaggcgacggaaccacatctcccatctctgagcacgactaccagattggcggatatactgaaaagtgggaatccggtgtaaaggactgcgtagtactccactcatacttcactagtgattactatcaactctacagcacccagttgagcactgatacgggggtcgagcatgtaaccttcttcatctataacaaaatagttgacgagccagaggagcatgtacaaatacataccattgacggttcttctggagtcgtgaatccggtaatggaacctatttatgatgaacccacaactactacaagtgtaccccttggaggcagcggcgggggtgggtctggcggatatcatttctttcacacgacggaccctagttttcttggtaggtatatgagcgctctttttgcggatgatctcaatcagcttacgggctaccacacggacttcagtagtgaaataatcgggtatcaattgatgtgccaacctattctgctcgcggaggcagaactcgccaagaacgtttctctgatcctcggcacggtatcttggaatcttaaaaggagataccttctgagcgcaggcatttttggcgcaataacagatgtgttttacaaagaaaatagctataaggttcctacagacaactacataaccacatatgcaaggatggcagccccgaaagaaattatattcttggagggggagactttgttcggtgacgacacagtcatagaggtagcaattatactcgcgagcttctccgcgtctactagacgaatggcgatggttaccaacaacacgtttacgttgaaggtcccccacgttggcgaaatacccgtcgcttacagaaaggtacttctcaagacgatacaaccacgggtggagaagtatctcttcgacgaaagtggggagtttaagctttcagaagttgggccggaacactccttggcggaatactatattttttttgcgtcattttattacaagaggaatggggggggttctggggggggtggatctggcggggatcctaagatctctgagatgcaccctgccctgcgccttgtggatccacagatacagttggctgtcacgagaatggagaatgcggtgggcagggatcagaataacgttggtccaaaggtatacccgatcattctccgacttggatctcccctctctctgaacatggccaggaagacgctcaacagtctcgaggataaggcttttcagctcacgccgattgcagtgcaaatgacaaaactcgccactacagaggaacttccagatgaatttgtcgttgtaaccgttaaaggaggttcaggcgggggtggctccggcgggagtgacaacgggccgcaaaatcagagaaatgcacctcgcataacgttcggaggaccgtccgactctaccgggagcaaccaaaatggggagcggagcggtgcgcgaagcaaacaacgacggccgcagggtctgccgaacaacacggcttcctggtttacagcgttgactcagcatgggaaagaggaccttaaattcccacgggggcagggggttcctattaacacaaattctagtccagacgaccaaatcggatattatcgcagagctacacgcaggattaggggaggtgatggcaaaatgaaagacttgtcaccgaggtggtatttttattacctcggtacaggccctgaagctggcctcccgtatggagcgaataaggatggcatcatttgggtcgccaccgaaggcgctttgaatacacctaaagatcatatcggcacaagaaaccccgcgaacaatgcagcaatagtattgcaactccctcaggggaccactttgcctaaaggtttctacgccgaaggtagccgaggcggttcacaagcgagtagtagatctagctctcggtctcggaactctagtaggaatagcacacctggttcttcacgcggcaccagcccggctagaatggcgggtaacggcggcgacgcagctttggcattgctgcttctggacagactcaaccaacttgaatctaaaatgagcggtaaggggcaacagcaacaagggcaaactgttacgaaaaaatcagctgcggaagcgtccaaaaaaccacgacagaaacggacggccactaaggcttacaatgtgacacaagcttttggtagacggggccctgaacagacgcaaggtaacttcggtgatcaagaactgattcgacaaggaacagattacaagcactggccacaaattgcacaattcgcccccagcgcgtcagctttctttgggatgagccgcattggaatggaagtcaccccgagcggaacctggctcacctatacgggggcaatcaaactcgatgataaagaccctaatttcaaggatcaggttattttgcttaataagcacatagacgcatataaaacctttccaccgacggaacctaaaaaggacaagaaaaaaaaggcagatgagacgcaagcactccctcagagacaaaagaagcaacagacggtgacattgctcccagcggcagatttggatgatttcagtaagcagttgcagcaatctatgtcttccgcggattccactcaggcaggtgggtctttgggcggcggaggttccggaattgttggcatagtggcgggcctcgctgtgttggccgtggttgtcataggagcagtcgttgccacggtcatgtgtagaaggaagtcatcaggtgggaaggggggcagttattcacaggcggcgagttccgacagtgcgcagggtagcgacgtatcactcactgcctagtaa

SEQ ID NO: 17366 - DNA, 4287 bp, Artificial Sequence
  Description of Artificial Sequence: Synthetic polynucleotide
atgcgcgtcatggccccacgaactttgatacttctgctgtccggcgcattggcccttacggaaacgtgggcgggaagcggcggctccggcggaggaggcagtggcggttctgataacggaccgcaaaatcaaaggaatgccccgaggataaccttcggcggacccagtgattctaccggctctaatcagaacggagaacgatccggcgctagatcaaaacaacgacgaccgcaggggttgccgaacaatactgcgagctggtttacggccctgacccaacatgggaaggaagatctcaaatttccgcgcggtcaaggggtccctattaacaccaatagttctcctgacgatcaaattggatactaccggagagccacccgacgaatacgcggaggagatggtaaaatgaaagatctttccccacgctggtatttctattacctcgggacaggaccagaagcgggattgccttatggtgctaataaagatggtatcatttgggtagcgacagaaggtgcgctgaatacgccgaaagatcacatcgggacacgcaacccagctaataatgccgctatcgtattgcaactgccccaaggaacaacgctgcctaagggattttatgcagagggaagtcggggggggtctcaagcctcatctcggagcagttcccgcagtcgaaattcctctcgcaattccacaccaggaagttcccgaggaacttcaccggcaagaatggcggggaacggcggtgatgctgcccttgctctgcttttgctcgatcgcctcaaccagcttgaaagcaagatgtctgggaagggacaacaacagcagggccaaacggtcacaaagaaaagtgccgccgaagcctccaagaaaccacgacaaaagcggacagccactaaagcttacaacgtgactcaagctttcggtcgacggggccctgagcagacccaagggaatttcggagatcaagaactgatacggcaagggacggattacaagcactggccccaaattgcccagtttgctccttctgcatctgcctttttcggtatgtcacggatcggaatggaggtaacgccgtccggaacatggctgacttatacaggagccattaaactcgacgataaagatcctaactttaaagatcaggttatactgctcaacaaacacatagatgcatacaaaactttcccccctacggaaccaaagaaggataagaagaagaaagctgacgagacgcaggccctcccgcaaagacaaaagaaacaacagactgtcaccctgttgccggcggctgatctggacgacttcagcaagcaattgcagcaatccatgtctagtgcagactccactcaggccggaagtggtggttccggggagggtagggggtctctcttgacatgtggcgacgtggaagaaaaccctgggcctgatcccaagatttcagaaatgcacccagctctcagactggtggaccctcaaatacagcttgcggtaacaagaatggaaaacgctgtagggcgcgaccagaataacgtcgggccaaaggtttaccccataattctgcgacttggtagtcctctttccctgaatatggcgcgcaaaacactgaattcattggaggataaggcgtttcaacttacgcctatagcagtccaaatgacgaaactggcaaccacagaagaactcccggacgagtttgttgtagtgaccgttaaagggagtgggggcagcggagccaccaacttctcactcctcaaacaagcaggtgacgtcgaagagaatcccggaccctaccacttcttccacaccactgacccgagcttcctgggtagatacatgtctgccctctttgcagacgatttgaatcaacttactggttaccatactgacttttcaagtgaaataattggctaccagctcatgtgtcaacccatcctgcttgcggaagcggaattggccaaaaatgtgtccctcatactggggacagtcagttggaacttgaagcggcgctacctcctgtcagccggtatttttggggcaatcacagatgtattctacaaagagaactcatacaaagtgcctacggacaactatataactacttatgctagaatggctgctccaaaagaaataatttttctggagggcgagactctctttggtgacgacacggtcattgaggtagcgataatacttgcgagcttctctgccagtacaagacgaatggctatggtaacgaacaacacatttacgttgaaggtgccgcacgttggagaaatccccgttgcatatcgaaaagttttgctgaaaaccattcagcctcgagtagagaaatacttgttcgacgaatccggtgagtttaaactgagcgaagtaggccccgaacactccctcgcagaatactatatatttttcgcttccttttactataaaagaaacggtggcagtggtgtcaagcaaaccctgaacttcgatctcctcaagttggcaggggatgtagagtctaaccctggtccggaccttttcatgaggatctttactatcggtacggtcaccctcaaacaaggcgagataaaagacgccacgccctcagacttcgtgcgagctactgcaaccatcccaatacaggcaagcctgccctttggctggttgatcgtcggggtggcactcctggctgtgtttcagagtgcgtcaaagataattactttgaagaagaggtggcaattggcactctccaaaggtgtccactttgtttgcaatttgcttctcctgtttgtcaccgtctacagccaccttctgctggtcgctgctggcctggaagcaccgttcctgtacctttatgccttggtgtacttcctccagagcattaactttgttagaatcatcatgcgcttgtggctgtgttggaaatgtcggtccaagaacccgctcctctatgatgcaaattatttcctttgttggcatacgaattgctatgactactgtattccatataattctgtaacgtcatcaattgttataacgagcggagacggtacgacctcccctattagcgaacatgattaccaaattggtggctacaccgaaaaatgggaatcaggagtaaaagactgcgttgtgttgcatagttattttaccagtgactattaccaattgtactcaactcaactgagcactgacacaggtgtggagcacgttaccttcttcatttacaacaagattgtggacgagcccgaagaacacgtgcagattcatacaattgatgggtccagtggtgttgtcaatccggtcatggagcccatatacgatgagccgactaccacaacttccgtgccgctcgggagcggcggatcaggacaatgcacaaattacgcactcttgaagttggccggtgatgtagaaagcaatcctggtccggccgacagcaacggaaccataactgtagaggaattgaaaaagctcctggaacaatggaatctcgtgatcggtttcctcttccttacatggatctgtttgcttcagtttgcgtatgctaatcgcaatcgctttctgtatatcataaaacttattttcctttggctcctgtggcccgtaacgctggcctgcttcgtgcttgcggcggtatatagaattaactggatcactggcggcatagcgatcgctatggcatgcttggtggggctcatgtggttgagctactttattgcatcttttagattgttcgcgcgaacgcgatccatgtggagttttaatcctgaaacgaatatattgctgaatgtacctttgcatggaacaattttgacgcgccccttgttggaaagcgaactcgtcataggcgctgtgatattgaggggacacctgcggatcgcgggtcaccacctcggacgatgcgatattaaggatctgcccaaagagatcacggtagccacctcccgaaccctgagttactacaagcttggtgctagccaacgagtggctggggactcaggtttcgcggcctatagtcgatatcgcatcggcaattacaagctgaatacggaccattctagtagtagtgataatatcgctctcctggtacaagggggaagcctcggtggagggggatccggtattgtcggaattgtcgccggtttggctgtgctggcagtagtagtgattggagcagttgtcgctactgtaatgtgcagaagaaagtccagcggcggcaaagggggatcttatagccaggcggcaagtagtgattcagcgcagggatccgatgtgagcttgacggcttagtaa

SEQ ID NO: 17367 - DNA, 4011 bp, Artificial Sequence
  Description of Artificial Sequence: Synthetic polynucleotide
atgcgggttatggccccgcggacccttatcctccttctctcaggcgcacttgccttgaccgaaacgtgggctgggagcgggggatctggtggtgggggttcagggggctccgacaatggacctcagaaccagaggaatgcccctagaattacttttggtgggccttctgactccacgggctccaaccaaaacggcgaacgatctggcgccagatcaaagcagcggaggcctcagggcttgccgaacaacaccgcctcctggttcacagccctgacccagcatggcaaggaagacctcaaatttccaagaggccagggcgttccaatcaacacgaatagcagccctgatgatcaaataggttattacagaagagccaccagaaggatcagaggaggcgatgggaaaatgaaggaccttagcccaaggtggtacttctactatctcggaaccgggcctgaagctgggttgccttacggcgccaataaggacggtataatatgggttgctacagaaggggcgcttaacactcccaaagatcatatcggtacgcgaaatcccgcaaacaatgccgcaatagtgttgcagctgccgcaaggaacaacgctccccaagggattttatgcagagggttctcggggaggcagtcaggcatcaagccgctccagttcaagatcacgaaatagctctaggaattctactccaggcagttcacgaggaacgtctccggcccgaatggccgggaatgggggcgatgccgctttggcgcttttgctgctggataggctcaaccaactggagagtaaaatgagtggaaaaggccagcagcaacaagggcagactgtcactaagaagtcagcagccgaagcaagcaagaaaccacgacaaaagcggaccgcgactaaggcatataatgtaacgcaggccttcggaagacgagggccagagcaaacccaaggcaacttcggtgaccaagaattgatcaggcaaggcaccgattataaacattggccgcaaatcgcgcaatttgctcctagcgcaagcgcctttttcggcatgagcaggattggcatggaagtcacaccaagtggaacatggctcacgtatacgggggcaattaaactcgatgacaaggacccgaatttcaaggatcaagtgattttgttgaacaagcacatagacgcgtacaaaactttcccgccaactgagcccaagaaggataaaaaaaagaaagcagacgagacacaggcactcccgcagcgacaaaagaaacaacagacggtgacgcttctgccagctgccgacctcgacgatttctccaagcaacttcagcaatcaatgtcaagcgcagattctactcaagcctttagagcttgcatggtcactaacaatacatttacactcaaggtaccgcatgtaggggaaattcccgtggcctaccggaaggtactgctcaaaacgattcaacctagggtagaaaaatatcttttcgatgaatcaggcgaatttaagcttagcgaagtgggcccagaacatagcctcgctgagtattatatttttttcgcgtccttttattataagagaaatggcgatcccaagatttcagaaatgcatcctgcccttcgcctcgtggatcctcaaatccagctcgccgttacaagaatggagaacgcggtaggtagagatcagaataatgttgggcctaaagtctatccgattattttgcggttgggcagccccctgagtttgaacatggctcgcaagaccttgaattcacttgaggacaaggcattccagctgacgcctattgcggtacagatgaccaagctggcaaccacggaagaactgccggatgagtttgtagtcgtcaccgtaaagtttaactccttccataccactgatcccagttttttggggcggtacatgagtgcccttttcgcggacgatcttaatcaactcacgggctatcacacagacttttccagtgaaatcatcgggtatcaactcatgtgtcagcccattctgctcgctgaggctgagctggcaaagaacgttagcttgatacttgggacggtgtcttggaacctcaaaaaacagggcgatctttttatgaggatttttacgattggtaccgtaacgcttaaacaaggagagattaaggacgcaaccccgagtgactttgtcagggcgacagcgaccatccctattcaagcaagcctgccttttggctggctcatagtcggggtcgctctgcttgctgtattccagagtgccagtaaaatcatcactcttaaaaagcgatggcagctggcccttagtaagggggtccatttcgtctgcaaccttctgcttttgtttgtcaccgtgtactctcatttgctcctggtggccgctggactggaggctcctttcctctacctttacgcccttgtttattttcttcaatccatcaatttcgtgcgaattataatgcgcctctggttgtgctggaagtgccggagcaaaaatcctctgctctacgatgctaactactttttgtgttggcacacgaattgctacgactactgcataccttacaattccgtgacctcatcaattgtgataacgagcggtgacggaacgacatcaccaatttctgagcatgactaccagattggtggctacacggaaaaatgggaatctggcgtcaaggactgtgtggtcctgcattcctattttacgagcgactattatcagctttactccacgcaacttagtacggacaccggtgtcgagcatgtcacgttttttatttacaataagattgttgatgaacctgaagaacacgtgcagatacataccattgacggctcttctggagttgtgaaccctgtcatggagcctatctacgacgagccaacaactacgacttccgtacctctgagaagaagctacttgttgtcagccgggatattcggtgcgatcaccgacgtcttctataaggagaatagttataaggtccctacagataattatattaccacctatgcgaggatggcggctcctaaggagattatattcttggagggggaaaccctgtttggcgatgacaccgtgatcgaggtggccattatacttgcatcattttctgccagtactctcttggtacaggctgatagtaatgggacaataacggttgaagaacttaaaaagcttctggaacagtggaacttggtcattggatttctgttcctcacgtggatttgcctcttgcaattcgcttatgcaaataggaatcggtttctttatatcatcaagttgatattcctctggctcctgtggccagtgactcttgcttgctttgtcctggctgccgtttaccgaataaattggataaccggtggtatcgcaatagctatggcctgtttggtgggtctgatgtggttgtcttacttcatagcatcattccgcttgttcgctagaactagatccatgtggtccttcaaccctgaaactaatattcttctgaatgtgcctcttcacggtacaattttgacacgaccactcctcgaaagcgaacttgtaattggggccgtgatcttgaggggccaccttaggattgcagggcaccacttgggcagatgcgacattaaggatttgccaaaagaaataacggtcgcgacttctcggacattgagttactacaaattgggtgcatcccaacgggtggcgggtgatagtgggtttgcggcctactctaggtatcgaatcggaaattacaagcttaacaccgaccattcaagtagttctgacaacatagctcttctggttcagggtggttctctgggtgggggaggctccgggattgtcgggattgtcgccggtcttgctgtacttgccgtggtggtaatcggagcagtcgtagctacagtgatgtgccgcagaaagagttctgggggtaaaggcggatcttatagccaggcagcaagcagtgattccgcacaaggatccgatgtgagtcttaccgcctgataa

SEQ ID NO: 17368 - DNA, 2577 bp, Artificial Sequence
  Description of Artificial Sequence: Synthetic polynucleotide
atgcgcgtaatggcgccacgaacgttgattctgttgttgagtggtgctctcgcgctcacggagacgtgggccggatcaggagggagcgggggtggtggctctggtggaaaggacctttctcctcggtggtatttttactatctggggaccggtcctgaagcggggttgccatatggcgccaacaaggatggcattatctgggtggcgacagagggcgcgcttaatacaccgaaggaccatataggaacgagaaatccagcgaacaatgctgcgattgtccttcagctgccgcaaggaacgaccttgcccaagggtttttacgccgagggctctagggggggctcccaagcatcatcccgatccagctcccggtctcgaaatagctcccggaatagcactcctggttcctcccggggaacgtccccagcgcgaatggcaggtaacgggggtgacgccgcattggctcttctcttgttggatagactgaatcagttggaatcaaagatgagcggaaagggacaacaacaacagggacaaaccgtaactaaaaaaagcgctgctgaggcgagtaaaaaaccgaggcaaaagcgaactgctacaaaagcgtataatgtcacacaagcctttggtcgcagaggtccagagcagactcagggtaacttcggagaccaggagttgatcagacaagggactgattacaagcactggccgcagatcgcgcaattcgctcccagcgcgagtgccttcttcggaatgtcaaggatcggaatggaggtcacgccctcaggcacctggctgacgtacacaggtgcaattaagctggacgataaggatcccaactttaaggatcaagtcatccttcttaacaaacacattgatgcctataaaaccttcccgcccacggagccgaagaaagataagaaaaaaaaagctgatgagacgcaggcgctgccacaaagacagaagaagcaacaaaccgtaaccctcctccctgcagcggacttggacgacttcagtaagcaactccagcaatccatgtccagtgcggatagtactcaggcgtttcgagcctgtatggttaccaacaacacattcactcttaaggtgccccatgttggggagatccccgtggcgtatagaaaagtactcttgaaaacgatccaacctcgcgtggagaaatacctctttgacgaatctggggaattcaaacttagcgaggtaggcccggaacattccctcgcagaatactatatttttttcgctagtttttactataagcgatgcttccatacgacagacccctcttttctgggacggtacatgtccgccttgtttgcggatgaccttaaccaattgacgggctaccatacagacttttcatccgaaataatcggttaccaactcatgtgtcagcctatactcctcgccgaagccgagctggcaaaaaatgtaagtctgattctgggtactgtgtcatggaatctgaagaagcgatatctcctttctgccggtatattcggtgcaataaccgacgtcttttataaggaaaacagttacaaagtaccgacagacaattatataaccacctatgcacgcatggccgcccccaaagaaatcattttccttgagggtgaaacgttgtttggggatgacacagttatagaggtggcgataatcctggcttcattcagtgcttctacgcgacgcagcggtgctgatagtaatggcacaattactgtagaagagttgaaaaaactgctggaacaatggaaccttgttataggctttttgtttttgacctggatatgtctcttgcagtttgcgtacgctaataggaacaggttcctgtacataatcaagctcatcttcttgtggctgctttggccagtaacacttgcctgttttgtgctggccgcggtttataggatcaactggataactggcgggatagcaatagctatggcgtgtctcgtcgggttgatgtggctgtcctattttatcgcatctttccgactttttgcacggaccagaagcatgtggtcctttaacccggagactaatattttgctcaatgtaccactgcacgggacaatactgacacgccccttgttggaatctgagttggtaataggggctgtaattctccgcggtcaccttaggattgcaggtcaccacctgggacgctgcgatataaaggatcttcctaaggaaattacggtagcaacgtcacgaactctcagttattataaacttggcgccagtcagcgagtcgctggcgatagcggattcgccgcgtactctagatacagaataggaaactacaaattgaacacggatcacagctcttcatcagacaatatcgcccttctcgtacagggaggctcactgggagggggcggcagtggtatagttggtattgtagcgggcttggcggtccttgcggtagttgttataggtgccgtcgtcgccactgtcatgtgcaggcggaaaagctctggtggaaagggcgggagctattcacaagccgcgtcctctgactctgctcagggttcagatgttagtcttacagcatgataa

SEQ ID NO: 17369 - DNA, 1521 bp, Artificial Sequence
  Description of Artificial Sequence: Synthetic polynucleotide
atgcgcgtgatggcaccgaggacgcttattctcttgctgtcaggtgcgctcgccctcactgagacatgggcagggtctggaggtagtggcggcggtgggagcggaggaagaatggctgggaatgggggcgacgctgcgctcgcactcttgctgttggaccgactgaatcagctcgagagcaaaatgagtggtaaggggcaacaacagatgcgcgcgtgtatggtgactaacaacacctttacccttaaagtgccgcatgttggtgaaattcccgttgcctacagaaaggttctccttaaaaccattcagccgagagtcgaaaaatatttgttcgacgagagtggtgaatttaaacttagtgaagtaggtccggaacacagtttggctgagtataagatgtgcggatataagcattggccacaaatagcccagttcgccccttccgcctccgcctttttcggtatgtcccggattggaatggaagtgaccccatcaggaacttggctcacatacaccggggctatcaaacttgatgataaagatccaaatttcaaagaccaagttatcctgctgaataagcacatcgatgcgtacaaaacgttccccgcgcgatgcgccaccaccgatccctcctttcttggtagatatatgagcgcgttgtttgccgacgacctgaaccaactcacagggtaccatacggatttctcatcagaaatcataggttatcaactgatgtgccagccaatcctgctggcggaggccgagctcgccaagaatgtttcccttatactgggtactgtgagctggaacctgaaaaaacaggggtttgcctatgcaaacaggaacaggttcttgtacatcataaagttgattttcctttggttgctgtggccggtgacccttgcctgttttgtactggcggccgtctatagaatcaattggattaccggagggattgcaattgctatggcgtgtcttgtgggattgatgtggctcagttacttcatcgcctcattccgcttgttctaccgctcttacttgctgagcgctgggatttttggagcaataacagacgttttctataaggaaaattcatataaggtcccaacagataattacataaccacatacgcgcggatggccgcgcctaaggaaattatattccttgagggggagacgctttttggcgatgacaccgttatcgaggtttcaatgtttaatttgggaagatgtgatattaaggaccttcccaaggagatcaccgttgcaacctcacgcacgctcagctattataaacttggggctagccagcgggttgccgggggcagcttgggtggcgggggtagtggtatcgtgggaatagttgctggattggccgtactggctgttgtcgtgataggggcggtagtagcaacagttatgtgtagacgcaagtcctcaggcggtaaaggaggttcatacagccaggcggcatcatctgatagtgcccaggggtccgatgtctcacttaccgcctagtaa

SEQ ID NO: 17370 - DNA, 1785 bp, Artificial Sequence
  Description of Artificial Sequence: Synthetic polynucleotide
atgcgggtaatggcaccacgcacgctgatccttcttctctccggtgcactcgctctgacggagacgtgggcgggaagtggtggatcagggggtggggggtctggaggcagtcccgctaggatggcaggaaatggaggtgatgccgcactggcccttttgttgctcgaccggcttaatcaacttgagtccaagatgagcggcaaaggtcaacaacagcaaggtcaaactgttaccaaaaagagcgcggcagaagcaagtaagaagccccgacaaaaaaggactgcaacgaaggcgtataacgtaacgcaggccttcggccgacgaggcccagaacagacacaggggaactttggggatcaggagctgataagacaaggtactgactacaaacactggcctcagattgctcaattcgctccaagtgccagtgcattcttcggaatgagccggatcgggatggaggtaactcccagcggaacatggttgacttacaccggagcgatcaaactggacgacaaggaccctaatttcaaggatcaggttatactgttgaacaaacatatcgacgcgtacaagacctttcctcccactgagcctaaaaaggacaagttcaaggcggccatggtaaccaacaacacctttacgttgaaagtaccccacgtaggtgaaataccggtggcctatcgaaaggtccttttgaagaccatccaaccccgcgttgaaaaatacctctttgacgagtctggtgaatttaaactcagcgaagtcggtcctgagcatagtttggcggaatattatattttttttgcaagtttttactataaaagaaatggcttcgcgtatgcaaatagaaatcggtttttgtacataattaagctgatatttctgtggctcttgtggccggtcacgctcgcgtgctttgtactcgcggcagtttacaggatcaactggattaccggaggtatagcaatagccatggcttgccttgttggcctcatgtggctttcatatttcatcgcaagttttagactcttctataatagttttcataccacagaccccagcttcttgggtagatacatgtccgcgctttttgccgatgacctcaaccagcttacagggtatcacactgacttttccagtgaaataattggatatcagctcatgtgtcagcccatcctgcttgcagaagctgagcttgcgaaaaatgtctccctcatcttggggacggtttcctggaatctcaaaaaaaatggactgggtcggtgcgacattaaggatctgccgaaagagatcacggtagctaccagcaggaccctgtcttattataagctcggggcttcccaacgagtggcttataggagttacttgctgagtgctgggatatttggtgcaattacagatgtcttctataaggagaactcatacaaagtacccactgataactacataacgacctacgcaagaatggctgcgcctaaagagattatatttttggaaggcgagacgttgttcggtgatgatactgttatagaagtagctattattttggcgagtttcagcgcgagtactcgacgacgagggggtggttctcttggaggaggaggatccgggatagtaggcattgtggctggcttggcggtgctcgcggtggtagtaatcggggctgttgtcgcaaccgtgatgtgtcgcagaaaatcctcaggtggcaagggtggcagctactctcaagctgctagcagcgattctgcccaagggagcgacgttagtcttacggcgtagtaa

SEQ ID NO: 17371 - DNA, 1764 bp, Artificial Sequence
  Description of Artificial Sequence: Synthetic polynucleotide
atgagggtgatggcccccaggaccctcatattgttgttgagcggggcccttgcactcactgaaacttgggctgggagtgggggtagtggtgggggtggcagtggcgggtcaccggctcgaatggcaggtaacggcggggatgccgcattggcgctcttgctgctcgacaggttgaaccagttggaatccaagatgagtggaaaaggtcagcaacaacaggggcagaccgtaacgaagaagagcgctgccgaggcctccaagaagcctcgccagaaacgaacggccacgaaggcttataacgtgacccaggcattcggtagaagaggtcctgaacagacacaaggaaactttggcgaccaggaactcatcaggcaagggacggactacaagcattggccgcaaatagcgcagttcgcgcccagcgccagcgccttctttggaatgtcaagaattggaatggaagttacgccgagtgggacttggcttacttatacgggcgctattaagctcgacgacaaggaccccaatttcaaggaccaagtgatattgctcaataagcacatcgacgcctacaagactttccctcccacagagcccaaaaaggataagttccgagcctgcatggtaacgaacaatacttttacacttaaggtgccccatgtaggagagatacctgtggcttatcgaaaagtgctgcttaagactattcaacctcgcgtcgaaaaatacctctttgacgagagtggtgagtttaagctgtcagaagtaggacccgagcattcattggcggagtattacatattcttcgccagtttttattataaaaggtgcttccacacgactgacccgtcttttcttggtaggtacatgagtgcgctgtttgcagacgatctgaatcagctcaccggttatcacacggattttagttcagaaatcataggctaccagttgatgtgccaaccaattcttctcgccgaggcggaacttgctaaaaatgttagtttgattttgggcaccgtaagctggaaccttaaaaaacgataccttctctctgccggcatatttggtgctattactgacgtgttctataaagagaattcatataaagttccaactgacaactatatcaccacctatgctaggatggcggcaccgaaggaaataatctttctggagggggaaactctgtttggtgatgataccgtaattgaggttgccataatactggcatcattctcagccagcactagaagacgcgggaagcttttggaacagtggaatttggttattggattcaaccgaaacaggtttttgtatataattaagctcatatttctttggttgttgtggcccgttacccttgcatgcttcgttcttgccgccgtctacagtgagctcgtaattggggcggttattctgcgaggacatctccgaatcgctggtcaccatctcggacgcacagtcgctacaagtaggacgctttcatactataaattgggagccagtcaacgagttaaacggtactcagggttgatgtggttgagctatttcgcaaggtacgccggaggatccctgggagggggaggcagcggtatagtcggtatcgtggcaggccttgcggtgctcgcggttgtagtcataggcgcagtggttgctacagtcatgtgtcgccgcaaatccagtggaggtaaggggggtagctattcccaggccgcttcatctgactcagcacaaggatcagacgtctctctgactgcataataa

SEQ ID NO: 17372 - protein, 4 aa, Artificial Sequence
  Description of Artificial Sequence: Synthetic peptide
YHFF

SEQ ID NO: 17373 - protein, 15 aa, Artificial Sequence
  Description of Artificial Sequence: Synthetic peptide
HTTDPSFLGRYMSAL

SEQ ID NO: 17374 - protein, 4 aa, Artificial Sequence
  Description of Artificial Sequence: Synthetic peptide
KRRY

SEQ ID NO: 17375 - protein, 13 aa, Artificial Sequence
  Description of Artificial Sequence: Synthetic peptide
APKEIIFLEGETL

SEQ ID NO: 17376 - protein, 11 aa, Artificial Sequence
  Description of Artificial Sequence: Synthetic peptide
AIILASFSAST

SEQ ID NO: 17377 - protein, 4 aa, Artificial Sequence
  Description of Artificial Sequence: Synthetic peptide
RRMA

SEQ ID NO: 17378 - protein, 16 aa, Artificial Sequence
  Description of Artificial Sequence: Synthetic peptide
VPHVGEIPVAYRKVLL

SEQ ID NO: 17379 - protein, 8 aa, Artificial Sequence
  Description of Artificial Sequence: Synthetic peptide
VEKGIYQT

SEQ ID NO: 17380 - protein, 418 aa, Artificial Sequence
  Description of Artificial Sequence: Synthetic polypeptide
SDNGPQNQRNAPRITFGGPSDSTGSNQNGERSGARSKQRRPQGLPNNTASWFTALTQHGKEDLKFPRGQGVPINTNSSPDDQIGYYRRATRRIRGGDGKMKDLSPRWYFYYLGTGPEAGLPYGANKDGIIWVATEGALNTPKDHIGTRNPANNAAIVLQLPQGTTLPKGFYAEGSRGGSQASSRSSSRSRNSSRNSTPGSSRGTSPARMAGNGGDAALALLLLDRLNQLESKMSGKGQQQQGQTVTKKSAAEASKKPRQKRTATKAYNVTQAFGRRGPEQTQGNFGDQELIRQGTDYKHWPQIAQFAPSASAFFGMSRIGMEVTPSGTWLTYTGAIKLDDKDPNFKDQVILLNKHIDAYKTFPPTEPKKDKKKKADETQALPQRQKKQQTVTLLPAADLDDFSKQLQQSMSSADSTQA

SEQ ID NO: 17381 - protein, 96 aa, Artificial Sequence
  Description of Artificial Sequence: Synthetic polypeptide
DPKISEMHPALRLVDPQIQLAVTRMENAVGRDQNNVGPKVYPIILRLGSPLSLNMARKTLNSLEDKAFQLTPIAVQMTKLATTEELPDEFVVVTVK

SEQ ID NO: 17382 - protein, 274 aa, Artificial Sequence
  Description of Artificial Sequence: Synthetic polypeptide
DLFMRIFTIGTVTLKQGEIKDATPSDFVRATATIPIQASLPFGWLIVGVALLAVFQSASKIITLKKRWQLALSKGVHFVCNLLLLFVTVYSHLLLVAAGLEAPFLYLYALVYFLQSINFVRIIMRLWLCWKCRSKNPLLYDANYFLCWHTNCYDYCIPYNSVTSSIVITSGDGTTSPISEHDYQIGGYTEKWESGVKDCVVLHSYFTSDYYQLYSTQLSTDTGVEHVTFFIYNKIVDEPEEHVQIHTIDGSSGVVNPVMEPIYDEPTTTTSVPL

SEQ ID NO: 17383 - protein, 24 aa, Artificial Sequence
  Description of Artificial Sequence: Synthetic peptide
GSGGSGEGRGSLLTCGDVEENPGP

SEQ ID NO: 17384 - protein, 25 aa, Artificial Sequence
  Description of Artificial Sequence: Synthetic peptide
GSGGSGATNFSLLKQAGDVEENPGP

SEQ ID NO: 17385 - protein, 25 aa, Artificial Sequence
  Description of Artificial Sequence: Synthetic peptide
GSGVKQTLNFDLLKLAGDVESNPGP

SEQ ID NO: 17386 - protein, 26 aa, Artificial Sequence
  Description of Artificial Sequence: Synthetic peptide
GSGGSGQCTNYALLKLAGDVESNPGP

SEQ ID NO: 17387 - protein, 4 aa, Artificial Sequence
  Description of Artificial Sequence: Synthetic peptide
FNSF

SEQ ID NO: 17388 - protein, 4 aa, Artificial Sequence
  Description of Artificial Sequence: Synthetic peptide
RRSY

SEQ ID NO: 17389 - protein, 4 aa, Artificial Sequence
  Description of Artificial Sequence: Synthetic peptide
LLVQ

SEQ ID NO: 17390 - DNA, 78 bp, Artificial Sequence
  Description of Artificial Sequence: Synthetic oligonucleotide
atgagagtgatggcccccagaaccctgatcctgctgctgtctggcgccctggccctgacagagacatgggccggaagc

SEQ ID NO: 17391 - DNA, 30 bp, Artificial Sequence
  Description of Artificial Sequence: Synthetic oligonucleotide
ggaggttccggaggaggcggcagtggcggc

SEQ ID NO: 17392 - DNA, 1254 bp, Artificial Sequence
  Description of Artificial Sequence: Synthetic polynucleotide
tctgataatggaccccaaaatcagcgaaatgcaccccgcattacgtttggtggaccctcagattcaactggcagtaaccagaatggagaacgcagtggggcgcgatcaaaacaacgtcggccccaaggtttacccaataatactgcgtcttggttcaccgctctcactcaacatggcaaggaagaccttaaattccctcgaggacaaggcgttccaattaacaccaatagcagtccagatgaccaaattggctactaccgaagagctaccagacgaattcgtggtggtgacggtaaaatgaaagatctcagtccaagatggtatttctactacctaggaactgggccagaagctggacttccctatggtgctaacaaagacggcatcatatgggttgcaactgagggagccttgaatacaccaaaagatcacattggcacccgcaatcctgctaacaatgctgcaatcgtgctacaacttcctcaaggaacaacattgccaaaaggcttctacgcagaagggagcagaggcggcagtcaagcctcttctcgttcctcatcacgtagtcgcaacagttcaagaaattcaactccaggcagcagtaggggaacttctcctgctagaatggctggcaatggcggtgatgctgctcttgctttgctgctgcttgacagattgaaccagcttgagagcaaaatgtctggtaaaggccaacaacaacaaggccaaactgtcactaagaaatctgctgctgaggcttctaagaagcctcggcaaaaacgtactgccactaaagcatacaatgtaacacaagctttcggcagacgtggtccagaacaaacccaaggaaattttggggaccaggaactaatcagacaaggaactgattacaaacattggccgcaaattgcacaatttgcccccagcgcttcagcgttcttcggaatgtcgcgcattggcatggaagtcacaccttcgggaacgtggttgacctacacaggtgccatcaaattggatgacaaagatccaaatttcaaagatcaagtcattttgctgaataagcatattgacgcatacaaaacattcccaccaacagagcctaaaaaggacaaaaagaagaaggctgatgaaactcaagccttaccgcagagacagaagaaacagcaaactgtgactcttcttcctgctgcagatttggatgatttctccaaacaattgcaacaatccatgagcagtgctgactcaactcaggcc

SEQ ID NO: 17393 - DNA, 30 bp, Artificial Sequence
  Description of Artificial Sequence: Synthetic oligonucleotide
ggaggttctgggggcggcggttcagggggc

SEQ ID NO: 17394 - DNA, 288 bp, Artificial Sequence
  Description of Artificial Sequence: Synthetic polynucleotide
gaccccaaaatcagcgaaatgcaccccgcattacgtttggtggaccctcagattcaactggcagtaaccagaatggagaacgcagtggggcgcgatcaaaacaacgtcggccccaaggtttacccaataatactgcgtcttggttcaccgctctcactcaacatggcaaggaagaccttaaattccctcgaggacaaggcgttccaattaacaccaatagcagtccagatgaccaaattggctactaccgaagagctaccagacgaattcgtggtggtgacggtaaaa

SEQ ID NO: 17395 - DNA, 12 bp, Artificial Sequence
  Description of Artificial Sequence: Synthetic oligonucleotide
taccatttcttt

SEQ ID NO: 17396 - DNA, 45 bp, Artificial Sequence
  Description of Artificial Sequence: Synthetic oligonucleotide
cacacaactgatcctagttttctgggtaggtacatgtcagcatta

SEQ ID NO: 17397 - DNA, 33 bp, Artificial Sequence
  Description of Artificial Sequence: Synthetic oligonucleotide
tttgctgatgatttaaaccagttaactggttat

SEQ ID NO: 17398 - DNA, 33 bp, Artificial Sequence
  Description of Artificial Sequence: Synthetic oligonucleotide
catactgacttttcaagtgaaatcataggatac

SEQ ID NO: 17399 - DNA, 27 bp, Artificial Sequence
  Description of Artificial Sequence: Synthetic oligonucleotide
cagcttatgtgtcaacctatactgtta

SEQ ID NO: 17400 - DNA, 33 bp, Artificial Sequence
  Description of Artificial Sequence: Synthetic oligonucleotide
gcagaagctgaacttgcaaagaatgtgtcctta

SEQ ID NO: 17401 - DNA, 27 bp, Artificial Sequence
  Description of Artificial Sequence: Synthetic oligonucleotide
attcttggaactgtttcttggaatttg

SEQ ID NO: 17402 - DNA, 12 bp, Artificial Sequence
  Description of Artificial Sequence: Synthetic oligonucleotide
aagcgtcgctat

SEQ ID NO: 17403 - DNA, 27 bp, Artificial Sequence
  Description of Artificial Sequence: Synthetic oligonucleotide
ttattatcagctggtatttttggtgct

SEQ ID NO: 17404 - DNA, 33 bp, Artificial Sequence
  Description of Artificial Sequence: Synthetic oligonucleotide
attacggatgttttctacaaagaaaacagttac

SEQ ID NO: 17405 - DNA, 33 bp, Artificial Sequence
  Description of Artificial Sequence: Synthetic oligonucleotide
aaagtgccaacagacaattatataaccacttac

SEQ ID NO: 17406 - DNA, 12 bp, Artificial Sequence
  Description of Artificial Sequence: Synthetic oligonucleotide
gcgcggatggct

SEQ ID NO: 17407 - DNA, 39 bp, Artificial Sequence
  Description of Artificial Sequence: Synthetic oligonucleotide
gccccaaaagaaattatcttcttagagggagaaacactt

SEQ ID NO: 17408 - DNA, 27 bp, Artificial Sequence
  Description of Artificial Sequence: Synthetic oligonucleotide
tttggtgatgacactgtgatagaagtg

SEQ ID NO: 17409 - DNA, 33 bp, Artificial Sequence
  Description of Artificial Sequence: Synthetic oligonucleotide
gccattattttggcatctttttctgcttccaca

SEQ ID NO: 17410 - DNA, 12 bp, Artificial Sequence
  Description of Artificial Sequence: Synthetic oligonucleotide
cgccgtatggca

SEQ ID NO: 17411 - DNA, 30 bp, Artificial Sequence
  Description of Artificial Sequence: Synthetic oligonucleotide
atggtaacaaacaataccttcacactcaaa

SEQ ID NO: 17412 - DNA, 48 bp, Artificial Sequence
  Description of Artificial Sequence: Synthetic oligonucleotide
gtccctcatgtgggcgaaataccagtggcttaccgcaaggttcttctt

SEQ ID NO: 17413 - DNA, 27 bp, Artificial Sequence
  Description of Artificial Sequence: Synthetic oligonucleotide
aagactattcaaccaagggttgaaaag

SEQ ID NO: 17414 - DNA, 33 bp, Artificial Sequence
  Description of Artificial Sequence: Synthetic oligonucleotide
tacttatttgatgagtctggtgagtttaaattg

SEQ ID NO: 17415 - DNA, 36 bp, Artificial Sequence
  Description of Artificial Sequence: Synthetic oligonucleotide
tcagaagtaggacctgagcatagtcttgccgaatac

SEQ ID NO: 17416 - DNA, 27 bp, Artificial Sequence
  Description of Artificial Sequence: Synthetic oligonucleotide
tacatcttctttgcatcattttattat

SEQ ID NO: 17417 - DNA, 12 bp, Artificial Sequence
  Description of Artificial Sequence: Synthetic oligonucleotide
aaacgtaacggg

SEQ ID NO: 17418 - DNA, 822 bp, Artificial Sequence
  Description of Artificial Sequence: Synthetic polynucleotide
gatttgtttatgagaatcttcacaattggaactgtaactttgaagcaaggtgaaatcaaggatgctactccttcagattttgttcgcgctactgcaacgataccgatacaagcctcactccctttcggatggcttattgttggcgttgcacttcttgctgtttttcagagcgcttccaaaatcataaccctcaaaaagagatggcaactagcactctccaagggtgttcactttgtttgcaacttgctgttgttgtttgtaacagtttactcacaccttttgctcgttgctgctggccttgaagccccttttctctatctttatgctttagtctacttcttgcagagtataaactttgtaagaataataatgaggctttggctttgctggaaatgccgttccaaaaacccattactttatgatgccaactattttctttgctggcatactaattgttacgactattgtataccttacaatagtgtaacttcttcaattgtcattacttcaggtgatggcacaacaagtcctatttctgaacatgactaccagattggtggttatactgaaaaatgggaatctggagtaaaagactgtgttgtattacacagttacttcacttcagactattaccagctgtactcaactcaattgagtacagacactggtgttgaacatgttaccttcttcatctacaataaaattgttgatgagcctgaagaacatgtccaaattcacacaatcgacggttcatccggagttgttaatccagtaatggaaccaatttatgatgaaccgacgacgactactagcgtgcctttg

SEQ ID NO: 17419 - DNA, 663 bp, Artificial Sequence
  Description of Artificial Sequence: Synthetic polynucleotide
gcagattccaacggtactattaccgttgaagagcttaaaaagctccttgaacaatggaacctagtaataggtttcctattccttacatggatttgtcttctacaatttgcctatgccaacaggaataggtttttgtatataattaagttaattttcctctggctgttatggccagtaactttagcttgttttgtgcttgctgctgtttacagaataaattggatcaccggtggaattgctatcgcaatggcttgtcttgtaggcttgatgtggctcagctacttcattgcttctttcagactgtttgcgcgtacgcgttccatgtggtcattcaatccagaaactaacattcttctcaacgtgccactccatggcactattctgaccagaccgcttctagaaagtgaactcgtaatcggagctgtgatccttcgtggacatcttcgtattgctggacaccatctaggacgctgtgacatcaaggacctgcctaaagaaatcactgttgctacatcacgaacgctttcttattacaaattgggagcttcgcagcgtgtagcaggtgactcaggttttgctgcatacagtcgctacaggattggcaactataaattaaacacagaccattccagtagcagtgacaatattgctttgcttgtacag

SEQ ID NO: 17420 - DNA, 30 bp, Artificial Sequence
  Description of Artificial Sequence: Synthetic oligonucleotide
ggtggttctcttggcggagggggttcggga

SEQ ID NO: 17421 - DNA, 171 bp, Artificial Sequence
  Description of Artificial Sequence: Synthetic polynucleotide
atcgtgggaattgtggcaggactggcagtgctggccgtggtggtgatcggagccgtggtggctaccgtgatgtgcagacggaagtccagcggaggcaagggcggcagctacagccaggccgccagctctgatagcgcccagggcagcgacgtgtcactgacagcctagtaa

SEQ ID NO: 17422 - DNA, 72 bp, Artificial Sequence
  Description of Artificial Sequence: Synthetic oligonucleotide
ggcagcggcggctccggcgagggcaggggaagtcttctaacatgcggggacgtggaggaaaatcccggccca

SEQ ID NO: 17423 - DNA, 75 bp, Artificial Sequence
  Description of Artificial Sequence: Synthetic oligonucleotide
ggcagcggcggcagcggcgccacaaacttctctctgctaaagcaagcaggtgatgttgaagaaaaccccgggcct

SEQ ID NO: 17424 - DNA, 75 bp, Artificial Sequence
  Description of Artificial Sequence: Synthetic oligonucleotide
ggcagcggcgtgaaacagactttgaattttgaccttctcaagttggcgggagacgtggagtccaaccctggacct

SEQ ID NO: 17425 - DNA, 78 bp, Artificial Sequence
  Description of Artificial Sequence: Synthetic oligonucleotide
ggcagcggcggctcgggccagtgtactaattatgctctcttgaaattggctggagatgttgagagcaacccaggtccc

SEQ ID NO: 17426 - DNA, 12 bp, Artificial Sequence
  Description of Artificial Sequence: Synthetic oligonucleotide
ttcagggcttgc

SEQ ID NO: 17427 - DNA, 12 bp, Artificial Sequence
  Description of Artificial Sequence: Synthetic oligonucleotide
aaaagaaatggc

SEQ ID NO: 17428 - DNA, 12 bp, Artificial Sequence
  Description of Artificial Sequence: Synthetic oligonucleotide
ttcaactctttt

SEQ ID NO: 17429 - DNA, 12 bp, Artificial Sequence
  Description of Artificial Sequence: Synthetic oligonucleotide
aaaaaacagggc

SEQ ID NO: 17430 - DNA, 12 bp, Artificial Sequence
  Description of Artificial Sequence: Synthetic oligonucleotide
cgccggagttac

SEQ ID NO: 17431 - DNA, 12 bp, Artificial Sequence
  Description of Artificial Sequence: Synthetic oligonucleotide
gcgcgaatggcg

SEQ ID NO: 17432 - DNA, 12 bp, Artificial Sequence
  Description of Artificial Sequence: Synthetic oligonucleotide
ctgctggtccag

SEQ ID NO: 17433 - protein, 14 aa, Artificial Sequence
  Description of Artificial Sequence: Synthetic peptide
TTDPSFLGRYMSAL

SEQ ID NO: 17434 - protein, 4 aa, Artificial Sequence
  Description of Artificial Sequence: Synthetic peptide
SMFN

SEQ ID NO: 17435 - protein, 19 aa, Artificial Sequence
  Description of Artificial Sequence: Synthetic peptide
TVATSRTLSYYKLGASQRV

SEQ ID NO: 17436 - DNA, 954 bp, Artificial Sequence
  Description of Artificial Sequence: Synthetic polynucleotide
aaagatctcagtccaagatggtatttctactacctaggaactgggccagaagctggacttccctatggtgctaacaaagacggcatcatatgggttgcaactgagggagccttgaatacaccaaaagatcacattggcacccgcaatcctgctaacaatgctgcaatcgtgctacaacttcctcaaggaacaacattgccaaaaggcttctacgcagaagggagcagaggcggcagtcaagcctcttctcgttcctcatcacgtagtcgcaacagttcaagaaattcaactccaggcagcagtaggggaacttctcctgctagaatggctggcaatggcggtgatgctgctcttgctttgctgctgcttgacagattgaaccagcttgagagcaaaatgtctggtaaaggccaacaacaacaaggccaaactgtcactaagaaatctgctgctgaggcttctaagaagcctcggcaaaaacgtactgccactaaagcatacaatgtaacacaagctttcggcagacgtggtccagaacaaacccaaggaaattttggggaccaggaactaatcagacaaggaactgattacaaacattggccgcaaattgcacaatttgcccccagcgcttcagcgttcttcggaatgtcgcgcattggcatggaagtcacaccttcgggaacgtggttgacctacacaggtgccatcaaattggatgacaaagatccaaatttcaaagatcaagtcattttgctgaataagcatattgacgcatacaaaacattcccaccaacagagcctaaaaaggacaaaaagaagaaggctgatgaaactcaagccttaccgcagagacagaagaaacagcaaactgtgactcttcttcctgctgcagatttggatgatttctccaaacaattgcaacaatccatgagcagtgctgactcaactcaggcc

SEQ ID NO: 17437 - DNA, 12 bp, Artificial Sequence
  Description of Artificial Sequence: Synthetic oligonucleotide
ttccgcgcgtgc

SEQ ID NO: 17438 - DNA, 12 bp, Artificial Sequence
  Description of Artificial Sequence: Synthetic oligonucleotide
aaaagatgtttt

SEQ ID NO: 17439 - DNA, 12 bp, Artificial Sequence
  Description of Artificial Sequence: Synthetic oligonucleotide
aaaaagcgttat

SEQ ID NO: 17440 - DNA, 12 bp, Artificial Sequence
  Description of Artificial Sequence: Synthetic oligonucleotide
gcccgaatggct

SEQ ID NO: 17441 - DNA, 12 bp, Artificial Sequence
  Description of Artificial Sequence: Synthetic oligonucleotide
aggaggtctgga

SEQ ID NO: 17442 - DNA, 99 bp, Artificial Sequence
  Description of Artificial Sequence: Synthetic oligonucleotide
agaatggctggcaatggcggtgatgctgctcttgctttgctgctgcttgacagattgaaccagcttgagagcaaaatgtctggtaaaggccaacaacaa

SEQ ID NO: 17443 - DNA, 12 bp, Artificial Sequence
  Description of Artificial Sequence: Synthetic oligonucleotide
atgagagcgtgc

SEQ ID NO: 17444 - DNA, 12 bp, Artificial Sequence
  Description of Artificial Sequence: Synthetic oligonucleotide
aaaatgtgcgga

SEQ ID NO: 17445 - DNA, 201 bp, Artificial Sequence
  Description of Artificial Sequence: Synthetic polynucleotide
tacaaacattggccgcaaattgcacaatttgcccccagcgcttcagcgttcttcggaatgtcgcgcattggcatggaagtcacaccttcgggaacgtggttgacctacacaggtgccatcaaattggatgacaaagatccaaatttcaaagatcaagtcattttgctgaataagcatattgacgcatacaaaacattccca

SEQ ID NO: 17446 - DNA, 12 bp, Artificial Sequence
  Description of Artificial Sequence: Synthetic oligonucleotide
gctcggtgtgca

SEQ ID NO: 17447 - DNA, 42 bp, Artificial Sequence
  Description of Artificial Sequence: Synthetic oligonucleotide
acaactgatcctagttttctgggtaggtacatgtcagcatta

SEQ ID NO: 17448 - DNA, 12 bp, Artificial Sequence
  Description of Artificial Sequence: Synthetic oligonucleotide
aaaaaacaaggt

SEQ ID NO: 17449 - DNA, 201 bp, Artificial Sequence
  Description of Artificial Sequence: Synthetic polynucleotide
tttgcctatgccaacaggaataggtttttgtatataattaagttaattttcctctggctgttatggccagtaactttagcttgttttgtgcttgctgctgtttacagaataaattggatcaccggtggaattgctatcgcaatggcttgtcttgtaggcttgatgtggctcagctacttcattgcttctttcagactgttt

SEQ ID NO: 17450 - DNA, 12 bp, Artificial Sequence
  Description of Artificial Sequence: Synthetic oligonucleotide
taccgctcctat

SEQ ID NO: 17451 - DNA, 12 bp, Artificial Sequence
  Description of Artificial Sequence: Synthetic oligonucleotide
gctcggatggct

SEQ ID NO: 17452 - DNA, 12 bp, Artificial Sequence
  Description of Artificial Sequence: Synthetic oligonucleotide
tctatgtttaac

SEQ ID NO: 17453 - DNA, 99 bp, Artificial Sequence
  Description of Artificial Sequence: Synthetic oligonucleotide
ctaggacgctgtgacatcaaggacctgcctaaagaaatcactgttgctacatcacgaacgctttcttattacaaattgggagcttcgcagcgtgtagca

SEQ ID NO: 17454 - DNA, 501 bp, Artificial Sequence
  Description of Artificial Sequence: Synthetic polynucleotide
tctcctgctagaatggctggcaatggcggtgatgctgctcttgctttgctgctgcttgacagattgaaccagcttgagagcaaaatgtctggtaaaggccaacaacaacaaggccaaactgtcactaagaaatctgctgctgaggcttctaagaagcctcggcaaaaacgtactgccactaaagcatacaatgtaacacaagctttcggcagacgtggtccagaacaaacccaaggaaattttggggaccaggaactaatcagacaaggaactgattacaaacattggccgcaaattgcacaatttgcccccagcgcttcagcgttcttcggaatgtcgcgcattggcatggaagtcacaccttcgggaacgtggttgacctacacaggtgccatcaaattggatgacaaagatccaaatttcaaagatcaagtcattttgctgaataagcatattgacgcatacaaaacattcccaccaacagagcctaaaaaggacaaa

SEQ ID NO: 17455 - DNA, 12 bp, Artificial Sequence
  Description of Artificial Sequence: Synthetic oligonucleotide
ttcaaagccgca

SEQ ID NO: 17456 - DNA, 12 bp, Artificial Sequence
  Description of Artificial Sequence: Synthetic oligonucleotide
aagaggaatggt

SEQ ID NO: 17457 - DNA, 12 bp, Artificial Sequence
  Description of Artificial Sequence: Synthetic oligonucleotide
tacaattctttc

SEQ ID NO: 17458 - DNA, 12 bp, Artificial Sequence
  Description of Artificial Sequence: Synthetic oligonucleotide
aagaaaaacgga

SEQ ID NO: 17459 - DNA, 12 bp, Artificial Sequence
  Description of Artificial Sequence: Synthetic oligonucleotide
taccgatcctac

SEQ ID NO: 17460 - DNA, 12 bp, Artificial Sequence
  Description of Artificial Sequence: Synthetic oligonucleotide
gctcggatggcg

SEQ ID NO: 17461 - DNA, 12 bp, Artificial Sequence
  Description of Artificial Sequence: Synthetic oligonucleotide
aggcgacggggt

SEQ ID NO: 17462 - DNA, 12 bp, Artificial Sequence
  Description of Artificial Sequence: Synthetic oligonucleotide
tttcgtgcgtgc

SEQ ID NO: 17463 - DNA, 12 bp, Artificial Sequence
  Description of Artificial Sequence: Synthetic oligonucleotide
aagcgctgtttt

SEQ ID NO: 17464 - DNA, 12 bp, Artificial Sequence
  Description of Artificial Sequence: Synthetic oligonucleotide
aaaaaacgttac

SEQ ID NO: 17465 - DNA, 12 bp, Artificial Sequence
  Description of Artificial Sequence: Synthetic oligonucleotide
gcgcgaatggca

SEQ ID NO: 17466 - DNA, 12 bp, Artificial Sequence
  Description of Artificial Sequence: Synthetic oligonucleotide
cgcaggcgcgga

SEQ ID NO: 17467 - DNA, 36 bp, Artificial Sequence
  Description of Artificial Sequence: Synthetic oligonucleotide
aagctccttgaacaatggaacctagtaataggtttc

SEQ ID NO: 17468 - DNA, 93 bp, Artificial Sequence
  Description of Artificial Sequence: Synthetic oligonucleotide
aacaggaataggtttttgtatataattaagttaattttcctctggctgttatggccagtaactttagcttgttttgtgcttgctgctgtttac

SEQ ID NO: 17469 - DNA, 69 bp, Artificial Sequence
  Description of Artificial Sequence: Synthetic oligonucleotide
agtgaactcgtaatcggagctgtgatccttcgtggacatcttcgtattgctggacaccatctaggacgc

SEQ ID NO: 17470 - DNA, 57 bp, Artificial Sequence
  Description of Artificial Sequence: Synthetic oligonucleotide
actgttgctacatcacgaacgctttcttattacaaattgggagcttcgcagcgtgta

SEQ ID NO: 17471 - DNA, 12 bp, Artificial Sequence
  Description of Artificial Sequence: Synthetic oligonucleotide
aaacgctacagt

SEQ ID NO: 17472 - DNA, 24 bp, Artificial Sequence
  Description of Artificial Sequence: Synthetic oligonucleotide
ggcttgatgtggctcagctacttc

SEQ ID NO: 17473 - DNA, 12 bp, Artificial Sequence
  Description of Artificial Sequence: Synthetic oligonucleotide
gcgcgttatgcc

SEQ ID NO: 17474 - protein, 1367 aa, Artificial Sequence
  Description of Artificial Sequence: Synthetic polypeptide
MRVMAPRTLILLLSGALALTETWAGSGGSGGGGSGGSDNGPQNQRNAPRITFGGPSDSTGSNQNGERSGARSKQRRPQGLPNNTASWFTALTQHGKEDLKFPRGQGVPINTNSSPDDQIGYYRRATRRIRGGDGKMKDLSPRWYFYYLGTGPEAGLPYGANKDGIIWVATEGALNTPKDHIGTRNPANNAAIVLQLPQGTTLPKGFYAEGSRGGSQASSRSSSRSRNSSRNSTPGSSRGTSPARMAGNGGDAALALLLLDRLNQLESKMSGKGQQQQGQTVTKKSAAEASKKPRQKRTATKAYNVTQAFGRRGPEQTQGNFGDQELIRQGTDYKHWPQIAQFAPSASAFFGMSRIGMEVTPSGTWLTYTGAIKLDDKDPNFKDQVILLNKHIDAYKTFPPTEPKKDKKKKADETQALPQRQKKQQTVTLLPAADLDDFSKQLQQSMSSADSTQAGGSGGGGSGGDPKISEMHPALRLVDPQIQLAVTRMENAVGRDQNNVGPKVYPIILRLGSPLSLNMARKTLNSLEDKAFQLTPIAVQMTKLATTEELPDEFVVVTVKGGSGGGGSGGYHFFHTTDPSFLGRYMSALFADDLNQLTGYHTDFSSEIIGYQLMCQPILLAEAELAKNVSLILGTVSWNLKRRYLLSAGIFGAITDVFYKENSYKVPTDNYITTYARMAAPKEIIFLEGETLFGDDTVIEVAIILASFSASTRRMAMVTNNTFTLKVPHVGEIPVAYRKVLLKTIQPRVEKYLFDESGEFKLSEVGPEHSLAEYYIFFASFYYKRNGGGSGGGGSGGDLFMRIFTIGTVTLKQGEIKDATPSDFVRATATIPIQASLPFGWLIVGVALLAVFQSASKIITLKKRWQLALSKGVHFVCNLLLLFVTVYSHLLLVAAGLEAPFLYLYALVYFLQSINFVRIIMRLWLCWKCRSKNPLLYDANYFLCWHTNCYDYCIPYNSVTSSIVITSGDGTTSPISEHDYQIGGYTEKWESGVKDCVVLHSYFTSDYYQLYSTQLSTDTGVEHVTFFIYNKIVDEPEEHVQIHTIDGSSGVVNPVMEPIYDEPTTTTSVPLGGSGGGGSGGADSNGTITVEELKKLLEQWNLVIGFLFLTWICLLQFAYANRNRFLYIIKLIFLWLLWPVTLACFVLAAVYRINWITGGIAIAMACLVGLMWLSYFIASFRLFARTRSMWSFNPETNILLNVPLHGTILTRPLLESELVIGAVILRGHLRIAGHHLGRCDIKDLPKEITVATSRTLSYYKLGASQRVAGDSGFAAYSRYRIGNYKLNTDHSSSSDNIALLVQGGSLGGGGSGIVGIVAGLAVLAVVVIGAVVATVMCRRKSSGGKGGSYSQAASSDSAQGSDVSLTA

SEQ ID NO: 17475 - protein, 1367 aa, Artificial Sequence
  Description of Artificial Sequence: Synthetic polypeptide
MRVMAPRTLILLLSGALALTETWAGSGGSGGGGSGGADSNGTITVEELKKLLEQWNLVIGFLFLTWICLLQFAYANRNRFLYIIKLIFLWLLWPVTLACFVLAAVYRINWITGGIAIAMACLVGLMWLSYFIASFRLFARTRSMWSFNPETNILLNVPLHGTILTRPLLESELVIGAVILRGHLRIAGHHLGRCDIKDLPKEITVATSRTLSYYKLGASQRVAGDSGFAAYSRYRIGNYKLNTDHSSSSDNIALLVQGGSGGGGSGGDLFMRIFTIGTVTLKQGEIKDATPSDFVRATATIPIQASLPFGWLIVGVALLAVFQSASKIITLKKRWQLALSKGVHFVCNLLLLFVTVYSHLLLVAAGLEAPFLYLYALVYFLQSINFVRIIMRLWLCWKCRSKNPLLYDANYFLCWHTNCYDYCIPYNSVTSSIVITSGDGTTSPISEHDYQIGGYTEKWESGVKDCVVLHSYFTSDYYQLYSTQLSTDTGVEHVTFFIYNKIVDEPEEHVQIHTIDGSSGVVNPVMEPIYDEPTTTTSVPLGGSGGGGSGGYHFFHTTDPSFLGRYMSALFADDLNQLTGYHTDFSSEIIGYQLMCQPILLAEAELAKNVSLILGTVSWNLKRRYLLSAGIFGAITDVFYKENSYKVPTDNYITTYARMAAPKEIIFLEGETLFGDDTVIEVAIILASFSASTRRMAMVTNNTFTLKVPHVGEIPVAYRKVLLKTIQPRVEKYLFDESGEFKLSEVGPEHSLAEYYIFFASFYYKRNGGGSGGGGSGGDPKISEMHPALRLVDPQIQLAVTRMENAVGRDQNNVGPKVYPIILRLGSPLSLNMARKTLNSLEDKAFQLTPIAVQMTKLATTEELPDEFVVVTVKGGSGGGGSGGSDNGPQNQRNAPRITFGGPSDSTGSNQNGERSGARSKQRRPQGLPNNTASWFTALTQHGKEDLKFPRGQGVPINTNSSPDDQIGYYRRATRRIRGGDGKMKDLSPRWYFYYLGTGPEAGLPYGANKDGIIWVATEGALNTPKDHIGTRNPANNAAIVLQLPQGTTLPKGFYAEGSRGGSQASSRSSSRSRNSSRNSTPGSSRGTSPARMAGNGGDAALALLLLDRLNQLESKMSGKGQQQQGQTVTKKSAAEASKKPRQKRTATKAYNVTQAFGRRGPEQTQGNFGDQELIRQGTDYKHWPQIAQFAPSASAFFGMSRIGMEVTPSGTWLTYTGAIKLDDKDPNFKDQVILLNKHIDAYKTFPPTEPKKDKKKKADETQALPQRQKKQQTVTLLPAADLDDFSKQLQQSMSSADSTQAGGSLGGGGSGIVGIVAGLAVLAVVVIGAVVATVMCRRKSSGGKGGSYSQAASSDSAQGSDVSLTA

SEQ ID NO: 17476 - protein, 1427 aa, Artificial Sequence
  Description of Artificial Sequence: Synthetic polypeptide
MRVMAPRTLILLLSGALALTETWAGSGGSGGGGSGGSDNGPQNQRNAPRITFGGPSDSTGSNQNGERSGARSKQRRPQGLPNNTASWFTALTQHGKEDLKFPRGQGVPINTNSSPDDQIGYYRRATRRIRGGDGKMKDLSPRWYFYYLGTGPEAGLPYGANKDGIIWVATEGALNTPKDHIGTRNPANNAAIVLQLPQGTTLPKGFYAEGSRGGSQASSRSSSRSRNSSRNSTPGSSRGTSPARMAGNGGDAALALLLLDRLNQLESKMSGKGQQQQGQTVTKKSAAEASKKPRQKRTATKAYNVTQAFGRRGPEQTQGNFGDQELIRQGTDYKHWPQIAQFAPSASAFFGMSRIGMEVTPSGTWLTYTGAIKLDDKDPNFKDQVILLNKHIDAYKTFPPTEPKKDKKKKADETQALPQRQKKQQTVTLLPAADLDDFSKQLQQSMSSADSTQAGSGGSGEGRGSLLTCGDVEENPGPDPKISEMHPALRLVDPQIQLAVTRMENAVGRDQNNVGPKVYPIILRLGSPLSLNMARKTLNSLEDKAFQLTPIAVQMTKLATTEELPDEFVVVTVKGSGGSGATNFSLLKQAGDVEENPGPYHFFHTTDPSFLGRYMSALFADDLNQLTGYHTDFSSEIIGYQLMCQPILLAEAELAKNVSLILGTVSWNLKRRYLLSAGIFGAITDVFYKENSYKVPTDNYITTYARMAAPKEIIFLEGETLFGDDTVIEVAIILASFSASTRRMAMVTNNTFTLKVPHVGEIPVAYRKVLLKTIQPRVEKYLFDESGEFKLSEVGPEHSLAEYYIFFASFYYKRNGGSGVKQTLNFDLLKLAGDVESNPGPDLFMRIFTIGTVTLKQGEIKDATPSDFVRATATIPIQASLPFGWLIVGVALLAVFQSASKIITLKKRWQLALSKGVHFVCNLLLLFVTVYSHLLLVAAGLEAPFLYLYALVYFLQSINFVRIIMRLWLCWKCRSKNPLLYDANYFLCWHTNCYDYCIPYNSVTSSIVITSGDGTTSPISEHDYQIGGYTEKWESGVKDCVVLHSYFTSDYYQLYSTQLSTDTGVEHVTFFIYNKIVDEPEEHVQIHTIDGSSGVVNPVMEPIYDEPTTTTSVPLGSGGSGQCTNYALLKLAGDVESNPGPADSNGTITVEELKKLLEQWNLVIGFLFLTWICLLQFAYANRNRFLYIIKLIFLWLLWPVTLACFVLAAVYRINWITGGIAIAMACLVGLMWLSYFIASFRLFARTRSMWSFNPETNILLNVPLHGTILTRPLLESELVIGAVILRGHLRIAGHHLGRCDIKDLPKEITVATSRTLSYYKLGASQRVAGDSGFAAYSRYRIGNYKLNTDHSSSSDNIALLVQGGSLGGGGSGIVGIVAGLAVLAVVVIGAVVATVMCRRKSSGGKGGSYSQAASSDSAQGSDVSLTA

SEQ ID NO: 17477 - protein, 1335 aa, Artificial Sequence
  Description of Artificial Sequence: Synthetic polypeptide
MRVMAPRTLILLLSGALALTETWAGSGGSGGGGSGGSDNGPQNQRNAPRITFGGPSDSTGSNQNGERSGARSKQRRPQGLPNNTASWFTALTQHGKEDLKFPRGQGVPINTNSSPDDQIGYYRRATRRIRGGDGKMKDLSPRWYFYYLGTGPEAGLPYGANKDGIIWVATEGALNTPKDHIGTRNPANNAAIVLQLPQGTTLPKGFYAEGSRGGSQASSRSSSRSRNSSRNSTPGSSRGTSPARMAGNGGDAALALLLLDRLNQLESKMSGKGQQQQGQTVTKKSAAEASKKPRQKRTATKAYNVTQAFGRRGPEQTQGNFGDQELIRQGTDYKHWPQIAQFAPSASAFFGMSRIGMEVTPSGTWLTYTGAIKLDDKDPNFKDQVILLNKHIDAYKTFPPTEPKKDKKKKADETQALPQRQKKQQTVTLLPAADLDDFSKQLQQSMSSADSTQAFRACMVTNNTFTLKVPHVGEIPVAYRKVLLKTIQPRVEKYLFDESGEFKLSEVGPEHSLAEYYIFFASFYYKRNGDPKISEMHPALRLVDPQIQLAVTRMENAVGRDQNNVGPKVYPIILRLGSPLSLNMARKTLNSLEDKAFQLTPIAVQMTKLATTEELPDEFVVVTVKFNSFHTTDPSFLGRYMSALFADDLNQLTGYHTDFSSEIIGYQLMCQPILLAEAELAKNVSLILGTVSWNLKKQGDLFMRIFTIGTVTLKQGEIKDATPSDFVRATATIPIQASLPFGWLIVGVALLAVFQSASKIITLKKRWQLALSKGVHFVCNLLLLFVTVYSHLLLVAAGLEAPFLYLYALVYFLQSINFVRIIMRLWLCWKCRSKNPLLYDANYFLCWHTNCYDYCIPYNSVTSSIVITSGDGTTSPISEHDYQIGGYTEKWESGVKDCVVLHSYFTSDYYQLYSTQLSTDTGVEHVTFFIYNKIVDEPEEHVQIHTIDGSSGVVNPVMEPIYDEPTTTTSVPLRRSYLLSAGIFGAITDVFYKENSYKVPTDNYITTYARMAAPKEIIFLEGETLFGDDTVIEVAIILASFSASTLLVQADSNGTITVEELKKLLEQWNLVIGFLFLTWICLLQFAYANRNRFLYIIKLIFLWLLWPVTLACFVLAAVYRINWITGGIAIAMACLVGLMWLSYFIASFRLFARTRSMWSFNPETNILLNVPLHGTILTRPLLESELVIGAVILRGHLRIAGHHLGRCDIKDLPKEITVATSRTLSYYKLGASQRVAGDSGFAAYSRYRIGNYKLNTDHSSSSDNIALLVQGGSLGGGGSGIVGIVAGLAVLAVVVIGAVVATVMCRRKSSGGKGGSYSQAASSDSAQGSDVSLTA

SEQ ID NO: 17478 - DNA, 4107 bp, Artificial Sequence
  Description of Artificial Sequence: Synthetic polynucleotide
atgagagtgatggcccccagaaccctgatcctgctgctgtctggcgccctggccctgacagagacatgggccggaagcggcggatcgggggggggcggctcgggaggatctgataatggaccccaaaatcagcgaaatgcaccccgcattacgtttggtggaccctcagattcaactggcagtaaccagaatggagaacgcagtggggcgcgatcaaaacaacgtcggccccaaggtttacccaataatactgcgtcttggttcaccgctctcactcaacatggcaaggaagaccttaaattccctcgaggacaaggcgttccaattaacaccaatagcagtccagatgaccaaattggctactaccgaagagctaccagacgaattcgtggtggtgacggtaaaatgaaagatctcagtccaagatggtatttctactacctaggaactgggccagaagctggacttccctatggtgctaacaaagacggcatcatatgggttgcaactgagggagccttgaatacaccaaaagatcacattggcacccgcaatcctgctaacaatgctgcaatcgtgctacaacttcctcaaggaacaacattgccaaaaggcttctacgcagaagggagcagaggcggcagtcaagcctcttctcgttcctcatcacgtagtcgcaacagttcaagaaattcaactccaggcagcagtaggggaacttctcctgctagaatggctggcaatggcggtgatgctgctcttgctttgctgctgcttgacagattgaaccagcttgagagcaaaatgtctggtaaaggccaacaacaacaaggccaaactgtcactaagaaatctgctgctgaggcttctaagaagcctcggcaaaaacgtactgccactaaagcatacaatgtaacacaagctttcggcagacgtggtccagaacaaacccaaggaaattttggggaccaggaactaatcagacaaggaactgattacaaacattggccgcaaattgcacaatttgcccccagcgcttcagcgttcttcggaatgtcgcgcattggcatggaagtcacaccttcgggaacgtggttgacctacacaggtgccatcaaattggatgacaaagatccaaatttcaaagatcaagtcattttgctgaataagcatattgacgcatacaaaacattcccaccaacagagcctaaaaaggacaaaaagaagaaggctgatgaaactcaagccttaccgcagagacagaagaaacagcaaactgtgactcttcttcctgctgcagatttggatgatttctccaaacaattgcaacaatccatgagcagtgctgactcaactcaggccgggggaagtggaggagggggatctggaggggaccccaaaatcagcgaaatgcaccccgcattacgtttggtggaccctcagattcaactggcagtaaccagaatggagaacgcagtggggcgcgatcaaaacaacgtcggccccaaggtttacccaataatactgcgtcttggttcaccgctctcactcaacatggcaaggaagaccttaaattccctcgaggacaaggcgttccaattaacaccaatagcagtccagatgaccaaattggctactaccgaagagctaccagacgaattcgtggtggtgacggtaaaagggggaagtggaggagggggatctggagggtatcatttctttcacacaactgatcctagttttctgggtaggtacatgtcagcattatttgctgatgatttaaaccagttaactggttatcatactgacttttcaagtgaaatcataggataccagcttatgtgtcaacctatactgttagcagaagctgaacttgcaaagaatgtgtccttaattcttggaactgtttcttggaatttgaagcgccgttatttattatcagctggtatttttggtgctattacggatgttttctacaaagaaaacagttacaaagtgccaacagacaattatataaccacttacgcccgaatggcggccccaaaagaaattatcttcttagagggagaaacactttttggtgatgacactgtgatagaagtggccattattttggcatctttttctgcttccacacgaagaatggccatggtaacaaacaataccttcacactcaaagtccctcatgtgggcgaaataccagtggcttaccgcaaggttcttcttaagactattcaaccaagggttgaaaagtacttatttgatgagtctggtgagtttaaattgtcagaagtaggacctgagcatagtcttgccgaatactacatcttctttgcatcattttattataaacgtaatggtgggggaagtggaggagggggatctggaggggatttgtttatgagaatcttcacaattggaactgtaactttgaagcaaggtgaaatcaaggatgctactccttcagattttgttcgcgctactgcaacgataccgatacaagcctcactccctttcggatggcttattgttggcgttgcacttcttgctgtttttcagagcgcttccaaaatcataaccctcaaaaagagatggcaactagcactctccaagggtgttcactttgtttgcaacttgctgttgttgtttgtaacagtttactcacaccttttgctcgttgctgctggccttgaagccccttttctctatctttatgctttagtctacttcttgcagagtataaactttgtaagaataataatgaggctttggctttgctggaaatgccgttccaaaaacccattactttatgatgccaactattttctttgctggcatactaattgttacgactattgtataccttacaatagtgtaacttcttcaattgtcattacttcaggtgatggcacaacaagtcctatttctgaacatgactaccagattggtggttatactgaaaaatgggaatctggagtaaaagactgtgttgtattacacagttacttcacttcagactattaccagctgtactcaactcaattgagtacagacactggtgttgaacatgttaccttcttcatctacaataaaattgttgatgagcctgaagaacatgtccaaattcacacaatcgacggttcatccggagttgttaatccagtaatggaaccaatttatgatgaaccgacgacgactactagcgtgcctttggggggaagtggaggagggggatctggaggggcagattccaacggtactattaccgttgaagagcttaaaaagctccttgaacaatggaacctagtaataggtttcctattccttacatggatttgtcttctacaatttgcctatgccaacaggaataggtttttgtatataattaagttaattttcctctggctgttatggccagtaactttagcttgttttgtgcttgctgctgtttacagaataaattggatcaccggtggaattgctatcgcaatggcttgtcttgtaggcttgatgtggctcagctacttcattgcttctttcagactgtttgcgcgtacgcgttccatgtggtcattcaatccagaaactaacattcttctcaacgtgccactccatggcactattctgaccagaccgcttctagaaagtgaactcgtaatcggagctgtgatccttcgtggacatcttcgtattgctggacaccatctaggacgctgtgacatcaaggacctgcctaaagaaatcactgttgctacatcacgaacgctttcttattacaaattgggagcttcgcagcgtgtagcaggtgactcaggttttgctgcatacagtcgctacaggattggcaactataaattaaacacagaccattccagtagcagtgacaatattgctttgcttgtacagggagggagcctgggtgggggcggcagtgggatcgtgggaattgtggcaggactggcagtgctggccgtggtggtgatcggagccgtggtggctaccgtgatgtgcagacggaagtccagcggaggcaagggcggcagctacagccaggccgccagctctgatagcgcccagggcagcgacgtgtcactgacagcctagtaa

SEQ ID NO: 17479 - DNA, 4107 bp, Artificial Sequence
  Description of Artificial Sequence: Synthetic polynucleotide
atgagagtgatggcccccagaaccctgatcctgctgctgtctggcgccctggccctgacagagacatgggccggaagcggcggatcgggggggggcggctcgggaggagcagattccaacggtactattaccgttgaagagcttaaaaagctccttgaacaatggaacctagtaataggtttcctattccttacatggatttgtcttctacaatttgcctatgccaacaggaataggtttttgtatataattaagttaattttcctctggctgttatggccagtaactttagcttgttttgtgcttgctgctgtttacagaataaattggatcaccggtggaattgctatcgcaatggcttgtcttgtaggcttgatgtggctcagctacttcattgcttctttcagactgtttgcgcgtacgcgttccatgtggtcattcaatccagaaactaacattcttctcaacgtgccactccatggcactattctgaccagaccgcttctagaaagtgaactcgtaatcggagctgtgatccttcgtggacatcttcgtattgctggacaccatctaggacgctgtgacatcaaggacctgcctaaagaaatcactgttgctacatcacgaacgctttcttattacaaattgggagcttcgcagcgtgtagcaggtgactcaggttttgctgcatacagtcgctacaggattggcaactataaattaaacacagaccattccagtagcagtgacaatattgctttgcttgtacaggggggaagtggaggagggggatctggaggggatttgtttatgagaatcttcacaattggaactgtaactttgaagcaaggtgaaatcaaggatgctactccttcagattttgttcgcgctactgcaacgataccgatacaagcctcactccctttcggatggcttattgttggcgttgcacttcttgctgtttttcagagcgcttccaaaatcataaccctcaaaaagagatggcaactagcactctccaagggtgttcactttgtttgcaacttgctgttgttgtttgtaacagtttactcacaccttttgctcgttgctgctggccttgaagccccttttctctatctttatgctttagtctacttcttgcagagtataaactttgtaagaataataatgaggctttggctttgctggaaatgccgttccaaaaacccattactttatgatgccaactattttctttgctggcatactaattgttacgactattgtataccttacaatagtgtaacttcttcaattgtcattacttcaggtgatggcacaacaagtcctatttctgaacatgactaccagattggtggttatactgaaaaatgggaatctggagtaaaagactgtgttgtattacacagttacttcacttcagactattaccagctgtactcaactcaattgagtacagacactggtgttgaacatgttaccttcttcatctacaataaaattgttgatgagcctgaagaacatgtccaaattcacacaatcgacggttcatccggagttgttaatccagtaatggaaccaatttatgatgaaccgacgacgactactagcgtgcctttggggggaagtggaggagggggatctggagggtatcatttctttcacacaactgatcctagttttctgggtaggtacatgtcagcattatttgctgatgatttaaaccagttaactggttatcatactgacttttcaagtgaaatcataggataccagcttatgtgtcaacctatactgttagcagaagctgaacttgcaaagaatgtgtccttaattcttggaactgtttcttggaatttgaagcgccgttatttattatcagctggtatttttggtgctattacggatgttttctacaaagaaaacagttacaaagtgccaacagacaattatataaccacttacgcccgaatggcggccccaaaagaaattatcttcttagagggagaaacactttttggtgatgacactgtgatagaagtggccattattttggcatctttttctgcttccacacgaagaatggccatggtaacaaacaataccttcacactcaaagtccctcatgtgggcgaaataccagtggcttaccgcaaggttcttcttaagactattcaaccaagggttgaaaagtacttatttgatgagtctggtgagtttaaattgtcagaagtaggacctgagcatagtcttgccgaatactacatcttctttgcatcattttattataaacgtaatggtgggggaagtggaggagggggatctggaggggaccccaaaatcagcgaaatgcaccccgcattacgtttggtggaccctcagattcaactggcagtaaccagaatggagaacgcagtggggcgcgatcaaaacaacgtcggccccaaggtttacccaataatactgcgtcttggttcaccgctctcactcaacatggcaaggaagaccttaaattccctcgaggacaaggcgttccaattaacaccaatagcagtccagatgaccaaattggctactaccgaagagctaccagacgaattcgtggtggtgacggtaaaagggggaagtggaggagggggatctggagggtctgataatggaccccaaaatcagcgaaatgcaccccgcattacgtttggtggaccctcagattcaactggcagtaaccagaatggagaacgcagtggggcgcgatcaaaacaacgtcggccccaaggtttacccaataatactgcgtcttggttcaccgctctcactcaacatggcaaggaagaccttaaattccctcgaggacaaggcgttccaattaacaccaatagcagtccagatgaccaaattggctactaccgaagagctaccagacgaattcgtggtggtgacggtaaaatgaaagatctcagtccaagatggtatttctactacctaggaactgggccagaagctggacttccctatggtgctaacaaagacggcatcatatgggttgcaactgagggagccttgaatacaccaaaagatcacattggcacccgcaatcctgctaacaatgctgcaatcgtgctacaacttcctcaaggaacaacattgccaaaaggcttctacgcagaagggagcagaggcggcagtcaagcctcttctcgttcctcatcacgtagtcgcaacagttcaagaaattcaactccaggcagcagtaggggaacttctcctgctagaatggctggcaatggcggtgatgctgctcttgctttgctgctgcttgacagattgaaccagcttgagagcaaaatgtctggtaaaggccaacaacaacaaggccaaactgtcactaagaaatctgctgctgaggcttctaagaagcctcggcaaaaacgtactgccactaaagcatacaatgtaacacaagctttcggcagacgtggtccagaacaaacccaaggaaattttggggaccaggaactaatcagacaaggaactgattacaaacattggccgcaaattgcacaatttgcccccagcgcttcagcgttcttcggaatgtcgcgcattggcatggaagtcacaccttcgggaacgtggttgacctacacaggtgccatcaaattggatgacaaagatccaaatttcaaagatcaagtcattttgctgaataagcatattgacgcatacaaaacattcccaccaacagagcctaaaaaggacaaaaagaagaaggctgatgaaactcaagccttaccgcagagacagaagaaacagcaaactgtgactcttcttcctgctgcagatttggatgatttctccaaacaattgcaacaatccatgagcagtgctgactcaactcaggccggagggagcctgggtgggggcggcagtgggatcgtgggaattgtggcaggactggcagtgctggccgtggtggtgatcggagccgtggtggctaccgtgatgtgcagacggaagtccagcggaggcaagggcggcagctacagccaggccgccagctctgatagcgcccagggcagcgacgtgtcactgacagcctagtaa

SEQ ID NO: 17480 - DNA, 4287 bp, Artificial Sequence
  Description of Artificial Sequence: Synthetic polynucleotide
atgagagtgatggcccccagaaccctgatcctgctgctgtctggcgccctggccctgacagagacatgggccggaagcggcggatcgggggggggcggctcgggaggatctgataatggaccccaaaatcagcgaaatgcaccccgcattacgtttggtggaccctcagattcaactggcagtaaccagaatggagaacgcagtggggcgcgatcaaaacaacgtcggccccaaggtttacccaataatactgcgtcttggttcaccgctctcactcaacatggcaaggaagaccttaaattccctcgaggacaaggcgttccaattaacaccaatagcagtccagatgaccaaattggctactaccgaagagctaccagacgaattcgtggtggtgacggtaaaatgaaagatctcagtccaagatggtatttctactacctaggaactgggccagaagctggacttccctatggtgctaacaaagacggcatcatatgggttgcaactgagggagccttgaatacaccaaaagatcacattggcacccgcaatcctgctaacaatgctgcaatcgtgctacaacttcctcaaggaacaacattgccaaaaggcttctacgcagaagggagcagaggcggcagtcaagcctcttctcgttcctcatcacgtagtcgcaacagttcaagaaattcaactccaggcagcagtaggggaacttctcctgctagaatggctggcaatggcggtgatgctgctcttgctttgctgctgcttgacagattgaaccagcttgagagcaaaatgtctggtaaaggccaacaacaacaaggccaaactgtcactaagaaatctgctgctgaggcttctaagaagcctcggcaaaaacgtactgccactaaagcatacaatgtaacacaagctttcggcagacgtggtccagaacaaacccaaggaaattttggggaccaggaactaatcagacaaggaactgattacaaacattggccgcaaattgcacaatttgcccccagcgcttcagcgttcttcggaatgtcgcgcattggcatggaagtcacaccttcgggaacgtggttgacctacacaggtgccatcaaattggatgacaaagatccaaatttcaaagatcaagtcattttgctgaataagcatattgacgcatacaaaacattcccaccaacagagcctaaaaaggacaaaaagaagaaggctgatgaaactcaagccttaccgcagagacagaagaaacagcaaactgtgactcttcttcctgctgcagatttggatgatttctccaaacaattgcaacaatccatgagcagtgctgactcaactcaggccggcagcggcggctccggcgagggcaggggaagtcttctaacatgcggggacgtggaggaaaatcccggcccagaccccaaaatcagcgaaatgcaccccgcattacgtttggtggaccctcagattcaactggcagtaaccagaatggagaacgcagtggggcgcgatcaaaacaacgtcggccccaaggtttacccaataatactgcgtcttggttcaccgctctcactcaacatggcaaggaagaccttaaattccctcgaggacaaggcgttccaattaacaccaatagcagtccagatgaccaaattggctactaccgaagagctaccagacgaattcgtggtggtgacggtaaaaggcagcggcggcagcggcgccacaaacttctctctgctaaagcaagcaggtgatgttgaagaaaaccccgggccttatcatttctttcacacaactgatcctagttttctgggtaggtacatgtcagcattatttgctgatgatttaaaccagttaactggttatcatactgacttttcaagtgaaatcataggataccagcttatgtgtcaacctatactgttagcagaagctgaacttgcaaagaatgtgtccttaattcttggaactgtttcttggaatttgaagcgccgttatttattatcagctggtatttttggtgctattacggatgttttctacaaagaaaacagttacaaagtgccaacagacaattatataaccacttacgcccgaatggcggccccaaaagaaattatcttcttagagggagaaacactttttggtgatgacactgtgatagaagtggccattattttggcatctttttctgcttccacacgaagaatggccatggtaacaaacaataccttcacactcaaagtccctcatgtgggcgaaataccagtggcttaccgcaaggttcttcttaagactattcaaccaagggttgaaaagtacttatttgatgagtctggtgagtttaaattgtcagaagtaggacctgagcatagtcttgccgaatactacatcttctttgcatcattttattataaacgtaatggtggcagcggcgtgaaacagactttgaattttgaccttctcaagttggcgggagacgtggagtccaaccctggacctgatttgtttatgagaatcttcacaattggaactgtaactttgaagcaaggtgaaatcaaggatgctactccttcagattttgttcgcgctactgcaacgataccgatacaagcctcactccctttcggatggcttattgttggcgttgcacttcttgctgtttttcagagcgcttccaaaatcataaccctcaaaaagagatggcaactagcactctccaagggtgttcactttgtttgcaacttgctgttgttgtttgtaacagtttactcacaccttttgctcgttgctgctggccttgaagccccttttctctatctttatgctttagtctacttcttgcagagtataaactttgtaagaataataatgaggctttggctttgctggaaatgccgttccaaaaacccattactttatgatgccaactattttctttgctggcatactaattgttacgactattgtataccttacaatagtgtaacttcttcaattgtcattacttcaggtgatggcacaacaagtcctatttctgaacatgactaccagattggtggttatactgaaaaatgggaatctggagtaaaagactgtgttgtattacacagttacttcacttcagactattaccagctgtactcaactcaattgagtacagacactggtgttgaacatgttaccttcttcatctacaataaaattgttgatgagcctgaagaacatgtccaaattcacacaatcgacggttcatccggagttgttaatccagtaatggaaccaatttatgatgaaccgacgacgactactagcgtgcctttgggcagcggcggctcgggccagtgtactaattatgctctcttgaaattggctggagatgttgagagcaacccaggtcccgcagattccaacggtactattaccgttgaagagcttaaaaagctccttgaacaatggaacctagtaataggtttcctattccttacatggatttgtcttctacaatttgcctatgccaacaggaataggtttttgtatataattaagttaattttcctctggctgttatggccagtaactttagcttgttttgtgcttgctgctgtttacagaataaattggatcaccggtggaattgctatcgcaatggcttgtcttgtaggcttgatgtggctcagctacttcattgcttctttcagactgtttgcgcgtacgcgttccatgtggtcattcaatccagaaactaacattcttctcaacgtgccactccatggcactattctgaccagaccgcttctagaaagtgaactcgtaatcggagctgtgatccttcgtggacatcttcgtattgctggacaccatctaggacgctgtgacatcaaggacctgcctaaagaaatcactgttgctacatcacgaacgctttcttattacaaattgggagcttcgcagcgtgtagcaggtgactcaggttttgctgcatacagtcgctacaggattggcaactataaattaaacacagaccattccagtagcagtgacaatattgctttgcttgtacagggagggagcctgggtgggggcggcagtgggatcgtgggaattgtggcaggactggcagtgctggccgtggtggtgatcggagccgtggtggctaccgtgatgtgcagacggaagtccagcggaggcaagggcggcagctacagccaggccgccagctctgatagcgcccagggcagcgacgtgtcactgacagcctagtaa

SEQ ID NO: 17481 - DNA, 4011 bp, Artificial Sequence
  Description of Artificial Sequence: Synthetic polynucleotide
atgagagtgatggcccccagaaccctgatcctgctgctgtctggcgccctggccctgacagagacatgggccggaagcggagggagtggtggcgggggatctggaggttctgataatggaccccaaaatcagcgaaatgcaccccgcattacgtttggtggaccctcagattcaactggcagtaaccagaatggagaacgcagtggggcgcgatcaaaacaacgtcggccccaaggtttacccaataatactgcgtcttggttcaccgctctcactcaacatggcaaggaagaccttaaattccctcgaggacaaggcgttccaattaacaccaatagcagtccagatgaccaaattggctactaccgaagagctaccagacgaattcgtggtggtgacggtaaaatgaaagatctcagtccaagatggtatttctactacctaggaactgggccagaagctggacttccctatggtgctaacaaagacggcatcatatgggttgcaactgagggagccttgaatacaccaaaagatcacattggcacccgcaatcctgctaacaatgctgcaatcgtgctacaacttcctcaaggaacaacattgccaaaaggcttctacgcagaagggagcagaggcggcagtcaagcctcttctcgttcctcatcacgtagtcgcaacagttcaagaaattcaactccaggcagcagtaggggaacttctcctgctagaatggctggcaatggcggtgatgctgctcttgctttgctgctgcttgacagattgaaccagcttgagagcaaaatgtctggtaaaggccaacaacaacaaggccaaactgtcactaagaaatctgctgctgaggcttctaagaagcctcggcaaaaacgtactgccactaaagcatacaatgtaacacaagctttcggcagacgtggtccagaacaaacccaaggaaattttggggaccaggaactaatcagacaaggaactgattacaaacattggccgcaaattgcacaatttgcccccagcgcttcagcgttcttcggaatgtcgcgcattggcatggaagtcacaccttcgggaacgtggttgacctacacaggtgccatcaaattggatgacaaagatccaaatttcaaagatcaagtcattttgctgaataagcatattgacgcatacaaaacattcccaccaacagagcctaaaaaggacaaaaagaagaaggctgatgaaactcaagccttaccgcagagacagaagaaacagcaaactgtgactcttcttcctgctgcagatttggatgatttctccaaacaattgcaacaatccatgagcagtgctgactcaactcaggcctttcgggcctgcatggtaacaaacaataccttcacactcaaagtccctcatgtgggcgaaataccagtggcttaccgcaaggttcttcttaagactattcaaccaagggttgaaaagtacttatttgatgagtctggtgagtttaaattgtcagaagtaggacctgagcatagtcttgccgaatactacatcttctttgcatcattttattataagcggaacggcgaccccaaaatcagcgaaatgcaccccgcattacgtttggtggaccctcagattcaactggcagtaaccagaatggagaacgcagtggggcgcgatcaaaacaacgtcggccccaaggtttacccaataatactgcgtcttggttcaccgctctcactcaacatggcaaggaagaccttaaattccctcgaggacaaggcgttccaattaacaccaatagcagtccagatgaccaaattggctactaccgaagagctaccagacgaattcgtggtggtgacggtaaaatttaactcttttcacacaactgatcctagttttctgggtaggtacatgtcagcattatttgctgatgatttaaaccagttaactggttatcatactgacttttcaagtgaaatcataggataccagcttatgtgtcaacctatactgttagcagaagctgaacttgcaaagaatgtgtccttaattcttggaactgtttcttggaatttgaaaaagcaaggagatttgtttatgagaatcttcacaattggaactgtaactttgaagcaaggtgaaatcaaggatgctactccttcagattttgttcgcgctactgcaacgataccgatacaagcctcactccctttcggatggcttattgttggcgttgcacttcttgctgtttttcagagcgcttccaaaatcataaccctcaaaaagagatggcaactagcactctccaagggtgttcactttgtttgcaacttgctgttgttgtttgtaacagtttactcacaccttttgctcgttgctgctggccttgaagccccttttctctatctttatgctttagtctacttcttgcagagtataaactttgtaagaataataatgaggctttggctttgctggaaatgccgttccaaaaacccattactttatgatgccaactattttctttgctggcatactaattgttacgactattgtataccttacaatagtgtaacttcttcaattgtcattacttcaggtgatggcacaacaagtcctatttctgaacatgactaccagattggtggttatactgaaaaatgggaatctggagtaaaagactgtgttgtattacacagttacttcacttcagactattaccagctgtactcaactcaattgagtacagacactggtgttgaacatgttaccttcttcatctacaataaaattgttgatgagcctgaagaacatgtccaaattcacacaatcgacggttcatccggagttgttaatccagtaatggaaccaatttatgatgaaccgacgacgactactagcgtgcctttgagacgttcttatttattatcagctggtatttttggtgctattacggatgttttctacaaagaaaacagttacaaagtgccaacagacaattatataaccacttacgctcgaatggctgccccaaaagaaattatcttcttagagggagaaacactttttggtgatgacactgtgatagaagtggccattattttggcatctttttctgcttccacactacttgtccaggcagattccaacggtactattaccgttgaagagcttaaaaagctccttgaacaatggaacctagtaataggtttcctattccttacatggatttgtcttctacaatttgcctatgccaacaggaataggtttttgtatataattaagttaattttcctctggctgttatggccagtaactttagcttgttttgtgcttgctgctgtttacagaataaattggatcaccggtggaattgctatcgcaatggcttgtcttgtaggcttgatgtggctcagctacttcattgcttctttcagactgtttgcgcgtacgcgttccatgtggtcattcaatccagaaactaacattcttctcaacgtgccactccatggcactattctgaccagaccgcttctagaaagtgaactcgtaatcggagctgtgatccttcgtggacatcttcgtattgctggacaccatctaggacgctgtgacatcaaggacctgcctaaagaaatcactgttgctacatcacgaacgctttcttattacaaattgggagcttcgcagcgtgtagcaggtgactcaggttttgctgcatacagtcgctacaggattggcaactataaattaaacacagaccattccagtagcagtgacaatattgctttgcttgtacagggtggctcgttaggtggcggagggtcaggcatcgtgggaattgtggcaggactggcagtgctggccgtggtggtgatcggagccgtggtggctaccgtgatgtgcagacggaagtccagcggaggcaagggcggcagctacagccaggccgccagctctgatagcgcccagggcagcgacgtgtcactgacagcctagtaa

SEQ ID NO: 17482 - protein, 857 aa, Artificial Sequence
  Description of Artificial Sequence: Synthetic polypeptide
MRVMAPRTLILLLSGALALTETWAGSGGSGGGGSGGKDLSPRWYFYYLGTGPEAGLPYGANKDGIIWVATEGALNTPKDHIGTRNPANNAAIVLQLPQGTTLPKGFYAEGSRGGSQASSRSSSRSRNSSRNSTPGSSRGTSPARMAGNGGDAALALLLLDRLNQLESKMSGKGQQQQGQTVTKKSAAEASKKPRQKRTATKAYNVTQAFGRRGPEQTQGNFGDQELIRQGTDYKHWPQIAQFAPSASAFFGMSRIGMEVTPSGTWLTYTGAIKLDDKDPNFKDQVILLNKHIDAYKTFPPTEPKKDKKKKADETQALPQRQKKQQTVTLLPAADLDDFSKQLQQSMSSADSTQAFRACMVTNNTFTLKVPHVGEIPVAYRKVLLKTIQPRVEKYLFDESGEFKLSEVGPEHSLAEYYIFFASFYYKRCFHTTDPSFLGRYMSALFADDLNQLTGYHTDFSSEIIGYQLMCQPILLAEAELAKNVSLILGTVSWNLKKRYLLSAGIFGAITDVFYKENSYKVPTDNYITTYARMAAPKEIIFLEGETLFGDDTVIEVAIILASFSASTRRSGADSNGTITVEELKKLLEQWNLVIGFLFLTWICLLQFAYANRNRFLYIIKLIFLWLLWPVTLACFVLAAVYRINWITGGIAIAMACLVGLMWLSYFIASFRLFARTRSMWSFNPETNILLNVPLHGTILTRPLLESELVIGAVILRGHLRIAGHHLGRCDIKDLPKEITVATSRTLSYYKLGASQRVAGDSGFAAYSRYRIGNYKLNTDHSSSSDNIALLVQGGSLGGGGSGIVGIVAGLAVLAVVVIGAVVATVMCRRKSSGGKGGSYSQAASSDSAQGSDVSLTA

SEQ ID NO: 17483 - protein, 505 aa, Artificial Sequence
  Description of Artificial Sequence: Synthetic polypeptide
MRVMAPRTLILLLSGALALTETWAGSGGSGGGGSGGRMAGNGGDAALALLLLDRLNQLESKMSGKGQQQMRACMVTNNTFTLKVPHVGEIPVAYRKVLLKTIQPRVEKYLFDESGEFKLSEVGPEHSLAEYKMCGYKHWPQIAQFAPSASAFFGMSRIGMEVTPSGTWLTYTGAIKLDDKDPNFKDQVILLNKHIDAYKTFPARCATTDPSFLGRYMSALFADDLNQLTGYHTDFSSEIIGYQLMCQPILLAEAELAKNVSLILGTVSWNLKKQGFAYANRNRFLYIIKLIFLWLLWPVTLACFVLAAVYRINWITGGIAIAMACLVGLMWLSYFIASFRLFYRSYLLSAGIFGAITDVFYKENSYKVPTDNYITTYARMAAPKEIIFLEGETLFGDDTVIEVSMFNLGRCDIKDLPKEITVATSRTLSYYKLGASQRVAGGSLGGGGSGIVGIVAGLAVLAVVVIGAVVATVMCRRKSSGGKGGSYSQAASSDSAQGSDVSLTA

SEQ ID NO: 17484 - protein, 593 aa, Artificial Sequence
  Description of Artificial Sequence: Synthetic polypeptide
MRVMAPRTLILLLSGALALTETWAGSGGSGGGGSGGSPARMAGNGGDAALALLLLDRLNQLESKMSGKGQQQQGQTVTKKSAAEASKKPRQKRTATKAYNVTQAFGRRGPEQTQGNFGDQELIRQGTDYKHWPQIAQFAPSASAFFGMSRIGMEVTPSGTWLTYTGAIKLDDKDPNFKDQVILLNKHIDAYKTFPPTEPKKDKFKAAMVTNNTFTLKVPHVGEIPVAYRKVLLKTIQPRVEKYLFDESGEFKLSEVGPEHSLAEYYIFFASFYYKRNGFAYANRNRFLYIIKLIFLWLLWPVTLACFVLAAVYRINWITGGIAIAMACLVGLMWLSYFIASFRLFYNSFHTTDPSFLGRYMSALFADDLNQLTGYHTDFSSEIIGYQLMCQPILLAEAELAKNVSLILGTVSWNLKKNGLGRCDIKDLPKEITVATSRTLSYYKLGASQRVAYRSYLLSAGIFGAITDVFYKENSYKVPTDNYITTYARMAAPKEIIFLEGETLFGDDTVIEVAIILASFSASTRRRGGGSLGGGGSGIVGIVAGLAVLAVVVIGAVVATVMCRRKSSGGKGGSYSQAASSDSAQGSDVSLTA

SEQ ID NO: 17485 - protein, 586 aa, Artificial Sequence
  Description of Artificial Sequence: Synthetic polypeptide
MRVMAPRTLILLLSGALALTETWAGSGGSGGGGSGGSPARMAGNGGDAALALLLLDRLNQLESKMSGKGQQQQGQTVTKKSAAEASKKPRQKRTATKAYNVTQAFGRRGPEQTQGNFGDQELIRQGTDYKHWPQIAQFAPSASAFFGMSRIGMEVTPSGTWLTYTGAIKLDDKDPNFKDQVILLNKHIDAYKTFPPTEPKKDKFRACMVTNNTFTLKVPHVGEIPVAYRKVLLKTIQPRVEKYLFDESGEFKLSEVGPEHSLAEYYIFFASFYYKRCFHTTDPSFLGRYMSALFADDLNQLTGYHTDFSSEIIGYQLMCQPILLAEAELAKNVSLILGTVSWNLKKRYLLSAGIFGAITDVFYKENSYKVPTDNYITTYARMAAPKEIIFLEGETLFGDDTVIEVAIILASFSASTRRRGKLLEQWNLVIGFNRNRFLYIIKLIFLWLLWPVTLACFVLAAVYSELVIGAVILRGHLRIAGHHLGRTVATSRTLSYYKLGASQRVKRYSGLMWLSYFARYAGGSLGGGGSGIVGIVAGLAVLAVVVIGAVVATVMCRRKSSGGKGGSYSQAASSDSAQGSDVSLTA

SEQ ID NO: 17486 - DNA, 2577 bp, Artificial Sequence
  Description of Artificial Sequence: Synthetic polynucleotide
atgagagtgatggcccccagaaccctgatcctgctgctgtctggcgccctggccctgacagagacatgggccggaagcggaggttccggaggaggcggcagtggcggcaaagatctcagtccaagatggtatttctactacctaggaactgggccagaagctggacttccctatggtgctaacaaagacggcatcatatgggttgcaactgagggagccttgaatacaccaaaagatcacattggcacccgcaatcctgctaacaatgctgcaatcgtgctacaacttcctcaaggaacaacattgccaaaaggcttctacgcagaagggagcagaggcggcagtcaagcctcttctcgttcctcatcacgtagtcgcaacagttcaagaaattcaactccaggcagcagtaggggaacttctcctgctagaatggctggcaatggcggtgatgctgctcttgctttgctgctgcttgacagattgaaccagcttgagagcaaaatgtctggtaaaggccaacaacaacaaggccaaactgtcactaagaaatctgctgctgaggcttctaagaagcctcggcaaaaacgtactgccactaaagcatacaatgtaacacaagctttcggcagacgtggtccagaacaaacccaaggaaattttggggaccaggaactaatcagacaaggaactgattacaaacattggccgcaaattgcacaatttgcccccagcgcttcagcgttcttcggaatgtcgcgcattggcatggaagtcacaccttcgggaacgtggttgacctacacaggtgccatcaaattggatgacaaagatccaaatttcaaagatcaagtcattttgctgaataagcatattgacgcatacaaaacattcccaccaacagagcctaaaaaggacaaaaagaagaaggctgatgaaactcaagccttaccgcagagacagaagaaacagcaaactgtgactcttcttcctgctgcagatttggatgatttctccaaacaattgcaacaatccatgagcagtgctgactcaactcaggccttccgcgcgtgcatggtaacaaacaataccttcacactcaaagtccctcatgtgggcgaaataccagtggcttaccgcaaggttcttcttaagactattcaaccaagggttgaaaagtacttatttgatgagtctggtgagtttaaattgtcagaagtaggacctgagcatagtcttgccgaatactacatcttctttgcatcattttattataaaagatgttttcacacaactgatcctagttttctgggtaggtacatgtcagcattatttgctgatgatttaaaccagttaactggttatcatactgacttttcaagtgaaatcataggataccagcttatgtgtcaacctatactgttagcagaagctgaacttgcaaagaatgtgtccttaattcttggaactgtttcttggaatttgaaaaagcgttatttattatcagctggtatttttggtgctattacggatgttttctacaaagaaaacagttacaaagtgccaacagacaattatataaccacttacgcccgaatggctgccccaaaagaaattatcttcttagagggagaaacactttttggtgatgacactgtgatagaagtggccattattttggcatctttttctgcttccacaaggaggtctggagcagattccaacggtactattaccgttgaagagcttaaaaagctccttgaacaatggaacctagtaataggtttcctattccttacatggatttgtcttctacaatttgcctatgccaacaggaataggtttttgtatataattaagttaattttcctctggctgttatggccagtaactttagcttgttttgtgcttgctgctgtttacagaataaattggatcaccggtggaattgctatcgcaatggcttgtcttgtaggcttgatgtggctcagctacttcattgcttctttcagactgtttgcgcgtacgcgttccatgtggtcattcaatccagaaactaacattcttctcaacgtgccactccatggcactattctgaccagaccgcttctagaaagtgaactcgtaatcggagctgtgatccttcgtggacatcttcgtattgctggacaccatctaggacgctgtgacatcaaggacctgcctaaagaaatcactgttgctacatcacgaacgctttcttattacaaattgggagcttcgcagcgtgtagcaggtgactcaggttttgctgcatacagtcgctacaggattggcaactataaattaaacacagaccattccagtagcagtgacaatattgctttgcttgtacagggtggttctcttggcggagggggttcgggaatcgtgggaattgtggcaggactggcagtgctggccgtggtggtgatcggagccgtggtggctaccgtgatgtgcagacggaagtccagcggaggcaagggcggcagctacagccaggccgccagctctgatagcgcccagggcagcgacgtgtcactgacagcctagtaa

SEQ ID NO: 17487 - DNA, 1521 bp, Artificial Sequence
  Description of Artificial Sequence: Synthetic polynucleotide
atgagagtgatggcccccagaaccctgatcctgctgctgtctggcgccctggccctgacagagacatgggccggaagcggaggttccggaggaggcggcagtggcggcagaatggctggcaatggcggtgatgctgctcttgctttgctgctgcttgacagattgaaccagcttgagagcaaaatgtctggtaaaggccaacaacaaatgagagcgtgcatggtaacaaacaataccttcacactcaaagtccctcatgtgggcgaaataccagtggcttaccgcaaggttcttcttaagactattcaaccaagggttgaaaagtacttatttgatgagtctggtgagtttaaattgtcagaagtaggacctgagcatagtcttgccgaatacaaaatgtgcggatacaaacattggccgcaaattgcacaatttgcccccagcgcttcagcgttcttcggaatgtcgcgcattggcatggaagtcacaccttcgggaacgtggttgacctacacaggtgccatcaaattggatgacaaagatccaaatttcaaagatcaagtcattttgctgaataagcatattgacgcatacaaaacattcccagctcggtgtgcaacaactgatcctagttttctgggtaggtacatgtcagcattatttgctgatgatttaaaccagttaactggttatcatactgacttttcaagtgaaatcataggataccagcttatgtgtcaacctatactgttagcagaagctgaacttgcaaagaatgtgtccttaattcttggaactgtttcttggaatttgaaaaaacaaggttttgcctatgccaacaggaataggtttttgtatataattaagttaattttcctctggctgttatggccagtaactttagcttgttttgtgcttgctgctgtttacagaataaattggatcaccggtggaattgctatcgcaatggcttgtcttgtaggcttgatgtggctcagctacttcattgcttctttcagactgttttaccgctcctatttattatcagctggtatttttggtgctattacggatgttttctacaaagaaaacagttacaaagtgccaacagacaattatataaccacttacgctcggatggctgccccaaaagaaattatcttcttagagggagaaacactttttggtgatgacactgtgatagaagtgtctatgtttaacctaggacgctgtgacatcaaggacctgcctaaagaaatcactgttgctacatcacgaacgctttcttattacaaattgggagcttcgcagcgtgtagcaggtggttctcttggcggagggggttcgggaatcgtgggaattgtggcaggactggcagtgctggccgtggtggtgatcggagccgtggtggctaccgtgatgtgcagacggaagtccagcggaggcaagggcggcagctacagccaggccgccagctctgatagcgcccagggcagcgacgtgtcactgacagcctagtaa

SEQ ID NO: 17488 - DNA, 1785 bp, Artificial Sequence
  Description of Artificial Sequence: Synthetic polynucleotide
atgagagtgatggcccccagaaccctgatcctgctgctgtctggcgccctggccctgacagagacatgggccggaagcggaggttccggaggaggcggcagtggcggctctcctgctagaatggctggcaatggcggtgatgctgctcttgctttgctgctgcttgacagattgaaccagcttgagagcaaaatgtctggtaaaggccaacaacaacaaggccaaactgtcactaagaaatctgctgctgaggcttctaagaagcctcggcaaaaacgtactgccactaaagcatacaatgtaacacaagctttcggcagacgtggtccagaacaaacccaaggaaattttggggaccaggaactaatcagacaaggaactgattacaaacattggccgcaaattgcacaatttgcccccagcgcttcagcgttcttcggaatgtcgcgcattggcatggaagtcacaccttcgggaacgtggttgacctacacaggtgccatcaaattggatgacaaagatccaaatttcaaagatcaagtcattttgctgaataagcatattgacgcatacaaaacattcccaccaacagagcctaaaaaggacaaattcaaagccgcaatggtaacaaacaataccttcacactcaaagtccctcatgtgggcgaaataccagtggcttaccgcaaggttcttcttaagactattcaaccaagggttgaaaagtacttatttgatgagtctggtgagtttaaattgtcagaagtaggacctgagcatagtcttgccgaatactacatcttctttgcatcattttattataagaggaatggttttgcctatgccaacaggaataggtttttgtatataattaagttaattttcctctggctgttatggccagtaactttagcttgttttgtgcttgctgctgtttacagaataaattggatcaccggtggaattgctatcgcaatggcttgtcttgtaggcttgatgtggctcagctacttcattgcttctttcagactgttttacaattctttccacacaactgatcctagttttctgggtaggtacatgtcagcattatttgctgatgatttaaaccagttaactggttatcatactgacttttcaagtgaaatcataggataccagcttatgtgtcaacctatactgttagcagaagctgaacttgcaaagaatgtgtccttaattcttggaactgtttcttggaatttgaagaaaaacggactaggacgctgtgacatcaaggacctgcctaaagaaatcactgttgctacatcacgaacgctttcttattacaaattgggagcttcgcagcgtgtagcataccgatcctacttattatcagctggtatttttggtgctattacggatgttttctacaaagaaaacagttacaaagtgccaacagacaattatataaccacttacgctcggatggcggccccaaaagaaattatcttcttagagggagaaacactttttggtgatgacactgtgatagaagtggccattattttggcatctttttctgcttccacaaggcgacggggtggtggttctcttggcggagggggttcgggaatcgtgggaattgtggcaggactggcagtgctggccgtggtggtgatcggagccgtggtggctaccgtgatgtgcagacggaagtccagcggaggcaagggcggcagctacagccaggccgccagctctgatagcgcccagggcagcgacgtgtcactgacagcctagtaa

SEQ ID NO: 17489 - DNA, 1764 bp, Artificial Sequence
  Description of Artificial Sequence: Synthetic polynucleotide
atgagagtgatggcccccagaaccctgatcctgctgctgtctggcgccctggccctgacagagacatgggccggaagcggaggttccggaggaggcggcagtggcggctctcctgctagaatggctggcaatggcggtgatgctgctcttgctttgctgctgcttgacagattgaaccagcttgagagcaaaatgtctggtaaaggccaacaacaacaaggccaaactgtcactaagaaatctgctgctgaggcttctaagaagcctcggcaaaaacgtactgccactaaagcatacaatgtaacacaagctttcggcagacgtggtccagaacaaacccaaggaaattttggggaccaggaactaatcagacaaggaactgattacaaacattggccgcaaattgcacaatttgcccccagcgcttcagcgttcttcggaatgtcgcgcattggcatggaagtcacaccttcgggaacgtggttgacctacacaggtgccatcaaattggatgacaaagatccaaatttcaaagatcaagtcattttgctgaataagcatattgacgcatacaaaacattcccaccaacagagcctaaaaaggacaaatttcgtgcgtgcatggtaacaaacaataccttcacactcaaagtccctcatgtgggcgaaataccagtggcttaccgcaaggttcttcttaagactattcaaccaagggttgaaaagtacttatttgatgagtctggtgagtttaaattgtcagaagtaggacctgagcatagtcttgccgaatactacatcttctttgcatcattttattataagcgctgttttcacacaactgatcctagttttctgggtaggtacatgtcagcattatttgctgatgatttaaaccagttaactggttatcatactgacttttcaagtgaaatcataggataccagcttatgtgtcaacctatactgttagcagaagctgaacttgcaaagaatgtgtccttaattcttggaactgtttcttggaatttgaaaaaacgttacttattatcagctggtatttttggtgctattacggatgttttctacaaagaaaacagttacaaagtgccaacagacaattatataaccacttacgcgcgaatggcagccccaaaagaaattatcttcttagagggagaaacactttttggtgatgacactgtgatagaagtggccattattttggcatctttttctgcttccacacgcaggcgcggaaagctccttgaacaatggaacctagtaataggtttcaacaggaataggtttttgtatataattaagttaattttcctctggctgttatggccagtaactttagcttgttttgtgcttgctgctgtttacagtgaactcgtaatcggagctgtgatccttcgtggacatcttcgtattgctggacaccatctaggacgcactgttgctacatcacgaacgctttcttattacaaattgggagcttcgcagcgtgtaaaacgctacagtggcttgatgtggctcagctacttcgcgcgttatgccggtggttctcttggcggagggggttcgggaatcgtgggaattgtggcaggactggcagtgctggccgtggtggtgatcggagccgtggtggctaccgtgatgtgcagacggaagtccagcggaggcaagggcggcagctacagccaggccgccagctctgatagcgcccagggcagcgacgtgtcactgacagcctagtaa

SEQ ID NO: 17490 - protein, 776 aa, Artificial Sequence
  Description of Artificial Sequence: Synthetic polypeptide
GGSGGGGSGGKDLSPRWYFYYLGTGPEAGLPYGANKDGIIWVATEGALNTPKDHIGTRNPANNAAIVLQLPQGTTLPKGFYAEGSRGGSQASSRSSSRSRNSSRNSTPGSSRGTSPARMAGNGGDAALALLLLDRLNQLESKMSGKGQQQQGQTVTKKSAAEASKKPRQKRTATKAYNVTQAFGRRGPEQTQGNFGDQELIRQGTDYKHWPQIAQFAPSASAFFGMSRIGMEVTPSGTWLTYTGAIKLDDKDPNFKDQVILLNKHIDAYKTFPPTEPKKDKKKKADETQALPQRQKKQQTVTLLPAADLDDFSKQLQQSMSSADSTQAFRACMVTNNTFTLKVPHVGEIPVAYRKVLLKTIQPRVEKYLFDESGEFKLSEVGPEHSLAEYYIFFASFYYKRCFHTTDPSFLGRYMSALFADDLNQLTGYHTDFSSEIIGYQLMCQPILLAEAELAKNVSLILGTVSWNLKKRYLLSAGIFGAITDVFYKENSYKVPTDNYITTYARMAAPKEIIFLEGETLFGDDTVIEVAIILASFSASTRRSGADSNGTITVEELKKLLEQWNLVIGFLFLTWICLLQFAYANRNRFLYIIKLIFLWLLWPVTLACFVLAAVYRINWITGGIAIAMACLVGLMWLSYFIASFRLFARTRSMWSFNPETNILLNVPLHGTILTRPLLESELVIGAVILRGHLRIAGHHLGRCDIKDLPKEITVATSRTLSYYKLGASQRVAGDSGFAAYSRYRIGNYKLNTDHSSSSDNIALLVQGGSGGGGSGG

SEQ ID NO: 17491 - protein, 862 aa, Artificial Sequence
  Description of Artificial Sequence: Synthetic polypeptide
MFVFLVLLPLVSSQCVNLTGGSGGGGSGGKDLSPRWYFYYLGTGPEAGLPYGANKDGIIWVATEGALNTPKDHIGTRNPANNAAIVLQLPQGTTLPKGFYAEGSRGGSQASSRSSSRSRNSSRNSTPGSSRGTSPARMAGNGGDAALALLLLDRLNQLESKMSGKGQQQQGQTVTKKSAAEASKKPRQKRTATKAYNVTQAFGRRGPEQTQGNFGDQELIRQGTDYKHWPQIAQFAPSASAFFGMSRIGMEVTPSGTWLTYTGAIKLDDKDPNFKDQVILLNKHIDAYKTFPPTEPKKDKKKKADETQALPQRQKKQQTVTLLPAADLDDFSKQLQQSMSSADSTQAFRACMVTNNTFTLKVPHVGEIPVAYRKVLLKTIQPRVEKYLFDESGEFKLSEVGPEHSLAEYYIFFASFYYKRCFHTTDPSFLGRYMSALFADDLNQLTGYHTDFSSEIIGYQLMCQPILLAEAELAKNVSLILGTVSWNLKKRYLLSAGIFGAITDVFYKENSYKVPTDNYITTYARMAAPKEIIFLEGETLFGDDTVIEVAIILASFSASTRRSGADSNGTITVEELKKLLEQWNLVIGFLFLTWICLLQFAYANRNRFLYIIKLIFLWLLWPVTLACFVLAAVYRINWITGGIAIAMACLVGLMWLSYFIASFRLFARTRSMWSFNPETNILLNVPLHGTILTRPLLESELVIGAVILRGHLRIAGHHLGRCDIKDLPKEITVATSRTLSYYKLGASQRVAGDSGFAAYSRYRIGNYKLNTDHSSSSDNIALLVQGGSGGGGSGGEQYIKWPWYIWLGFIAGLIAIVMVTIMLCCMTSCCSCLKGCCSCGSCCKFDEDDSEPVLKGVKLHYT

SEQ ID NO: 17492 - protein, 424 aa, Artificial Sequence
  Description of Artificial Sequence: Synthetic polypeptide
GGSGGGGSGGRMAGNGGDAALALLLLDRLNQLESKMSGKGQQQMRACMVTNNTFTLKVPHVGEIPVAYRKVLLKTIQPRVEKYLFDESGEFKLSEVGPEHSLAEYKMCGYKHWPQIAQFAPSASAFFGMSRIGMEVTPSGTWLTYTGAIKLDDKDPNFKDQVILLNKHIDAYKTFPARCATTDPSFLGRYMSALFADDLNQLTGYHTDFSSEIIGYQLMCQPILLAEAELAKNVSLILGTVSWNLKKQGFAYANRNRFLYIIKLIFLWLLWPVTLACFVLAAVYRINWITGGIAIAMACLVGLMWLSYFIASFRLFYRSYLLSAGIFGAITDVFYKENSYKVPTDNYITTYARMAAPKEIIFLEGETLFGDDTVIEVSMFNLGRCDIKDLPKEITVATSRTLSYYKLGASQRVAGGSGGGGSGG

SEQ ID NO: 17493 - protein, 510 aa, Artificial Sequence
  Description of Artificial Sequence: Synthetic polypeptide
MFVFLVLLPLVSSQCVNLTGGSGGGGSGGRMAGNGGDAALALLLLDRLNQLESKMSGKGQQQMRACMVTNNTFTLKVPHVGEIPVAYRKVLLKTIQPRVEKYLFDESGEFKLSEVGPEHSLAEYKMCGYKHWPQIAQFAPSASAFFGMSRIGMEVTPSGTWLTYTGAIKLDDKDPNFKDQVILLNKHIDAYKTFPARCATTDPSFLGRYMSALFADDLNQLTGYHTDFSSEIIGYQLMCQPILLAEAELAKNVSLILGTVSWNLKKQGFAYANRNRFLYIIKLIFLWLLWPVTLACFVLAAVYRINWITGGIAIAMACLVGLMWLSYFIASFRLFYRSYLLSAGIFGAITDVFYKENSYKVPTDNYITTYARMAAPKEIIFLEGETLFGDDTVIEVSMFNLGRCDIKDLPKEITVATSRTLSYYKLGASQRVAGGSGGGGSGGEQYIKWPWYIWLGFIAGLIAIVMVTIMLCCMTSCCSCLKGCCSCGSCCKFDEDDSEPVLKGVKLHYT

SEQ ID NO: 17494 - protein, 512 aa, Artificial Sequence
  Description of Artificial Sequence: Synthetic polypeptide
GGSGGGGSGGSPARMAGNGGDAALALLLLDRLNQLESKMSGKGQQQQGQTVTKKSAAEASKKPRQKRTATKAYNVTQAFGRRGPEQTQGNFGDQELIRQGTDYKHWPQIAQFAPSASAFFGMSRIGMEVTPSGTWLTYTGAIKLDDKDPNFKDQVILLNKHIDAYKTFPPTEPKKDKFKAAMVTNNTFTLKVPHVGEIPVAYRKVLLKTIQPRVEKYLFDESGEFKLSEVGPEHSLAEYYIFFASFYYKRNGFAYANRNRFLYIIKLIFLWLLWPVTLACFVLAAVYRINWITGGIAIAMACLVGLMWLSYFIASFRLFYNSFHTTDPSFLGRYMSALFADDLNQLTGYHTDFSSEIIGYQLMCQPILLAEAELAKNVSLILGTVSWNLKKNGLGRCDIKDLPKEITVATSRTLSYYKLGASQRVAYRSYLLSAGIFGAITDVFYKENSYKVPTDNYITTYARMAAPKEIIFLEGETLFGDDTVIEVAIILASFSASTRRRGGGSGGGGSGG

SEQ ID NO: 17495 - protein, 598 aa, Artificial Sequence
  Description of Artificial Sequence: Synthetic polypeptide
MFVFLVLLPLVSSQCVNLTGGSGGGGSGGSPARMAGNGGDAALALLLLDRLNQLESKMSGKGQQQQGQTVTKKSAAEASKKPRQKRTATKAYNVTQAFGRRGPEQTQGNFGDQELIRQGTDYKHWPQIAQFAPSASAFFGMSRIGMEVTPSGTWLTYTGAIKLDDKDPNFKDQVILLNKHIDAYKTFPPTEPKKDKFKAAMVTNNTFTLKVPHVGEIPVAYRKVLLKTIQPRVEKYLFDESGEFKLSEVGPEHSLAEYYIFFASFYYKRNGFAYANRNRFLYIIKLIFLWLLWPVTLACFVLAAVYRINWITGGIAIAMACLVGLMWLSYFIASFRLFYNSFHTTDPSFLGRYMSALFADDLNQLTGYHTDFSSEIIGYQLMCQPILLAEAELAKNVSLILGTVSWNLKKNGLGRCDIKDLPKEITVATSRTLSYYKLGASQRVAYRSYLLSAGIFGAITDVFYKENSYKVPTDNYITTYARMAAPKEIIFLEGETLFGDDTVIEVAIILASFSASTRRRGGGSGGGGSGGEQYIKWPWYIWLGFIAGLIAIVMVTIMLCCMTSCCSCLKGCCSCGSCCKFDEDDSEPVLKGVKLHYT

SEQ ID NO: 17496 - protein, 505 aa, Artificial Sequence
  Description of Artificial Sequence: Synthetic polypeptide
GGSGGGGSGGSPARMAGNGGDAALALLLLDRLNQLESKMSGKGQQQQGQTVTKKSAAEASKKPRQKRTATKAYNVTQAFGRRGPEQTQGNFGDQELIRQGTDYKHWPQIAQFAPSASAFFGMSRIGMEVTPSGTWLTYTGAIKLDDKDPNFKDQVILLNKHIDAYKTFPPTEPKKDKFRACMVTNNTFTLKVPHVGEIPVAYRKVLLKTIQPRVEKYLFDESGEFKLSEVGPEHSLAEYYIFFASFYYKRCFHTTDPSFLGRYMSALFADDLNQLTGYHTDFSSEIIGYQLMCQPILLAEAELAKNVSLILGTVSWNLKKRYLLSAGIFGAITDVFYKENSYKVPTDNYITTYARMAAPKEIIFLEGETLFGDDTVIEVAIILASFSASTRRRGKLLEQWNLVIGFNRNRFLYIIKLIFLWLLWPVTLACFVLAAVYSELVIGAVILRGHLRIAGHHLGRTVATSRTLSYYKLGASQRVKRYSGLMWLSYFARYAGGSGGGGSGG

SEQ ID NO: 17497 - protein, 591 aa, Artificial Sequence
  Description of Artificial Sequence: Synthetic polypeptide
MFVFLVLLPLVSSQCVNLTGGSGGGGSGGSPARMAGNGGDAALALLLLDRLNQLESKMSGKGQQQQGQTVTKKSAAEASKKPRQKRTATKAYNVTQAFGRRGPEQTQGNFGDQELIRQGTDYKHWPQIAQFAPSASAFFGMSRIGMEVTPSGTWLTYTGAIKLDDKDPNFKDQVILLNKHIDAYKTFPPTEPKKDKFRACMVTNNTFTLKVPHVGEIPVAYRKVLLKTIQPRVEKYLFDESGEFKLSEVGPEHSLAEYYIFFASFYYKRCFHTTDPSFLGRYMSALFADDLNQLTGYHTDFSSEIIGYQLMCQPILLAEAELAKNVSLILGTVSWNLKKRYLLSAGIFGAITDVFYKENSYKVPTDNYITTYARMAAPKEIIFLEGETLFGDDTVIEVAIILASFSASTRRRGKLLEQWNLVIGFNRNRFLYIIKLIFLWLLWPVTLACFVLAAVYSELVIGAVILRGHLRIAGHHLGRTVATSRTLSYYKLGASQRVKRYSGLMWLSYFARYAGGSGGGGSGGEQYIKWPWYIWLGFIAGLIAIVMVTIMLCCMTSCCSCLKGCCSCGSCCKFDEDDSEPVLKGVKLHYT

SEQ ID NO: 17498 - DNA, 57 bp, Artificial Sequence
  Description of Artificial Sequence: Synthetic oligonucleotide
atgtttgtttttcttgttttacttcctttagtctcttctcagtgtgtcaatttgaca

SEQ ID NO: 17499 - DNA, 2328 bp, Artificial Sequence
  Description of Artificial Sequence: Synthetic polynucleotide
ggcggctctggaggaggcggctccggaggcaaagatctgagcccaagatggtacttttactacctgggaacaggacctgaagctggactgccttatggagcaaataaagatggaatcatctgggtggcaacagaaggagcactgaatacaccaaaagatcacattggaaccagaaatccagcaaataatgcagcaatcgtgctgcagctgccacagggaacaacactgccaaaaggattttacgcagaaggaagcagaggaggaagccaggcaagcagcagaagcagcagcagaagcagaaatagcagcagaaatagcacacctggaagcagcagaggaacaagccctgcaagaatggcaggaaatggaggagatgcagcactggcactgctgctgctggatagactgaatcagctggaaagcaaaatgagcggaaaaggacagcagcagcagggacagacagtgacaaagaaaagcgctgctgaagcttccaagaaaccaagacagaaaagaacagcaacaaaagcatacaatgtgacacaggcatttggaaggagaggacctgaacagacccagggaaattttggagatcaggaactgatcagacagggaaccgattacaaacactggcctcagattgctcagtttgctccttctgcttctgctttctttggaatgtccagaattggaatggaagtgacaccttctggaacatggctgacatacacaggagcaatcaaactggatgataaagatccaaattttaaagatcaggtgattctgctgaataaacacattgatgcttacaaaacatttccaccaacagaaccaaagaaagataaaaagaagaaagctgatgaaacacaggctctgcctcagagacagaagaaacagcagacagtgacactgctgcctgctgctgatctggatgatttttccaaacagctgcagcagtccatgtcctccgctgattccacacaggcttttagagcttgcatggtgacaaacaacacatttacactgaaagtgcctcatgtgggagaaattcctgtggcttacagaaaagtgctgctgaaaacaattcaaccaagagtggaaaaatacctgtttgatgaatctggagaatttaaactttctgaagtgggacctgaacactctcttgctgaatactacattttctttgcttctttttactataaaagatgttttcacacaactgatccatcttttctgggaagatacatgtctgctctttttgctgatgatttaaatcagttaacaggatatcacacagatttttcttctgaaatcattggataccagttgatgtgtcaaccaattttgttggctgaagctgaattggcaaaaaacgtgtctttgattcttggaacagtttcttggaatcttaaaaagagatacttattatctgctggaatttttggagctatcacagatgtgttttacaaagaaaactcatacaaagtgccaacagacaattacataacaacatacgccagaatggctgctccaaaagaaatcatcttccttgaaggagaaacactttttggagatgatacagtgattgaagtggcaattattctggcatctttttctgcatccacaagaagatctggagctgattccaatggaacaattacagtggaagaactgaaaaagctgctggaacagtggaatctggtgattggatttctgtttctgacatggatttgtctgctgcagtttgcttacgctaatagaaatagatttctgtacattattaaactgatttttctgtggctgctgtggcctgtgacactggcttgctttgtgctggctgctgtgtacagaattaattggattacaggaggaattgcaattgcaatggcatgcctggtgggactgatgtggctgtcttactttattgcttcttttagactgtttgcaagaacaagatctatgtggtcttttaatcctgaaacaaatattctgctgaatgtgcctctgcacggaacaattctgacaagacctctgctggaatctgaactggtgattggagctgtgattctgagaggacacctgagaattgctggacaccacctgggaagatgcgatattaaagatctgccaaaagaaattacagtggcaacaagcagaacactgagctactacaaactgggagcttcccaaagagtggctggagatagcggatttgctgcttacagcagatacagaattggaaattacaaactgaataccgatcacagctcatcttctgataatattgctctgctggtgcagggaggatccggtggtggcggcagcggcggc

SEQ ID NO: 17500 - DNA, 207 bp, Artificial Sequence
  Description of Artificial Sequence: Synthetic polynucleotide
gaacagtacattaaatggccttggtacatttggcttggatttattgcaggattaattgcaattgtgatggtgacaattatgttatgttgtatgacatcatgttgttcttgtttaaaaggatgttgttcttgtggaagctgttgtaaatttgatgaagatgattctgaacctgtgttaaaaggagtgaaattgcattacacatgatga

SEQ ID NO: 17501 - DNA, 11 bp, Artificial Sequence
  Description of Artificial Sequence: Synthetic oligonucleotide
ctggagctagc

SEQ ID NO: 17502 - DNA, 3037 bp, Artificial Sequence
  Description of Artificial Sequence: Synthetic polynucleotide
attcttctggtccccacagactcagagagaacccgccaccatgtttgtttttcttgttttacttcctttagtctcttctcagtgtgtcaatttgacaggcggctctggaggaggcggctccggaggcaaagatctgagcccaagatggtacttttactacctgggaacaggacctgaagctggactgccttatggagcaaataaagatggaatcatctgggtggcaacagaaggagcactgaatacaccaaaagatcacattggaaccagaaatccagcaaataatgcagcaatcgtgctgcagctgccacagggaacaacactgccaaaaggattttacgcagaaggaagcagaggaggaagccaggcaagcagcagaagcagcagcagaagcagaaatagcagcagaaatagcacacctggaagcagcagaggaacaagccctgcaagaatggcaggaaatggaggagatgcagcactggcactgctgctgctggatagactgaatcagctggaaagcaaaatgagcggaaaaggacagcagcagcagggacagacagtgacaaagaaaagcgctgctgaagcttccaagaaaccaagacagaaaagaacagcaacaaaagcatacaatgtgacacaggcatttggaaggagaggacctgaacagacccagggaaattttggagatcaggaactgatcagacagggaaccgattacaaacactggcctcagattgctcagtttgctccttctgcttctgctttctttggaatgtccagaattggaatggaagtgacaccttctggaacatggctgacatacacaggagcaatcaaactggatgataaagatccaaattttaaagatcaggtgattctgctgaataaacacattgatgcttacaaaacatttccaccaacagaaccaaagaaagataaaaagaagaaagctgatgaaacacaggctctgcctcagagacagaagaaacagcagacagtgacactgctgcctgctgctgatctggatgatttttccaaacagctgcagcagtccatgtcctccgctgattccacacaggcttttagagcttgcatggtgacaaacaacacatttacactgaaagtgcctcatgtgggagaaattcctgtggcttacagaaaagtgctgctgaaaacaattcaaccaagagtggaaaaatacctgtttgatgaatctggagaatttaaactttctgaagtgggacctgaacactctcttgctgaatactacattttctttgcttctttttactataaaagatgttttcacacaactgatccatcttttctgggaagatacatgtctgctctttttgctgatgatttaaatcagttaacaggatatcacacagatttttcttctgaaatcattggataccagttgatgtgtcaaccaattttgttggctgaagctgaattggcaaaaaacgtgtctttgattcttggaacagtttcttggaatcttaaaaagagatacttattatctgctggaatttttggagctatcacagatgtgttttacaaagaaaactcatacaaagtgccaacagacaattacataacaacatacgccagaatggctgctccaaaagaaatcatcttccttgaaggagaaacactttttggagatgatacagtgattgaagtggcaattattctggcatctttttctgcatccacaagaagatctggagctgattccaatggaacaattacagtggaagaactgaaaaagctgctggaacagtggaatctggtgattggatttctgtttctgacatggatttgtctgctgcagtttgcttacgctaatagaaatagatttctgtacattattaaactgatttttctgtggctgctgtggcctgtgacactggcttgctttgtgctggctgctgtgtacagaattaattggattacaggaggaattgcaattgcaatggcatgcctggtgggactgatgtggctgtcttactttattgcttcttttagactgtttgcaagaacaagatctatgtggtcttttaatcctgaaacaaatattctgctgaatgtgcctctgcacggaacaattctgacaagacctctgctggaatctgaactggtgattggagctgtgattctgagaggacacctgagaattgctggacaccacctgggaagatgcgatattaaagatctgccaaaagaaattacagtggcaacaagcagaacactgagctactacaaactgggagcttcccaaagagtggctggagatagcggatttgctgcttacagcagatacagaattggaaattacaaactgaataccgatcacagctcatcttctgataatattgctctgctggtgcagggaggatccggtggtggcggcagcggcggcgaacagtacattaaatggccttggtacatttggcttggatttattgcaggattaattgcaattgtgatggtgacaattatgttatgttgtatgacatcatgttgttcttgtttaaaaggatgttgttcttgtggaagctgttgtaaatttgatgaagatgattctgaacctgtgttaaaaggagtgaaattgcattacacatgatgactcgagctggtactgcatgcacgcaatgctagctgcccctttcccgtcctgggtaccccgagtctcccccgacctcgggtcccaggtatgctcccacctccacctgccccactcaccacctctgctagttccagacacctcccaagcacgcagcaatgcagctcaaaacgcttagcctagccacacccccacgggaaacagcagtgattaacctttagcaataaacgaaagtttaactaagctatactaaccccagggttggtcaatttcgtgccagccacaccctggagctagcaaaaaaaaaaaaaaaaaaaaaaaaaaaaaagcatatgactaaaaaaaaaaaaaaaaaaaaaaaaaaaaaaaaaaaaaaaaaaaaaaaaaaaaaaaaaaaaaaaaaaaaaa

SEQ ID NO: 17503 - DNA, 1272 bp, Artificial Sequence
  Description of Artificial Sequence: Synthetic polynucleotide
ggcggctctggaggaggcggctccggaggcagaatggctggaaatggaggagatgctgctctggctctgctgctgctggatagactgaatcagctggaatcaaaaatgtctggaaaaggacagcaacagatgagagcttgcatggtgacaaacaacacatttacactgaaagtgcctcatgtgggagaaattcctgtggcttacagaaaagtgctgctgaaaacaattcaaccaagagtggaaaaatacctgtttgatgaatctggagaatttaaactttctgaagtgggacctgaacactctcttgctgaatacaaaatgtgcggatacaaacactggcctcagattgctcagtttgctccttctgcttctgctttctttggaatgagcagaattggaatggaagtgacaccttctggaacatggctgacatacacaggagcaatcaaactggatgataaagatccaaactttaaagatcaggtgattctgctgaacaaacacattgatgcttacaaaacatttcctgctagatgtgctacaactgatccttcttttctgggaagatacatgtctgctctttttgctgatgatttaaatcagttaacaggatatcacacagatttttcttctgaaatcattggataccagttgatgtgtcaaccaattttgttggctgaagctgaattggcaaaaaacgtgtctttgattcttggaacagtttcttggaatcttaaaaaacaaggatttgcatacgcaaatagaaatagatttctgtacattattaaactgatttttctgtggctgctgtggcctgtgacactggcttgctttgtgctggctgctgtgtacagaataaattggataacaggaggaattgcaattgcaatggcatgcttggtgggattgatgtggttgtcttactttattgcttcttttagactgttttacagatcctacttattatctgctggaatttttggagctatcacagatgtgttttacaaagaaaactcatacaaagtgccaacagacaattacataacaacatacgctagaatggctgctccaaaagaaatcatcttccttgaaggagaaacactttttggagatgatacagtgattgaagtgtccatgtttaatctgggaagatgcgatattaaagatctgccaaaagaaattacagtggcaacaagcagaacactgagctactacaaactgggagcaagccagagagtggcaggaggatccggtggtggcggcagcggcggc

SEQ ID NO: 17504 - DNA, 1981 bp, Artificial Sequence
  Description of Artificial Sequence: Synthetic polynucleotide
attcttctggtccccacagactcagagagaacccgccaccatgtttgtttttcttgttttacttcctttagtctcttctcagtgtgtcaatttgacaggcggctctggaggaggcggctccggaggcagaatggctggaaatggaggagatgctgctctggctctgctgctgctggatagactgaatcagctggaatcaaaaatgtctggaaaaggacagcaacagatgagagcttgcatggtgacaaacaacacatttacactgaaagtgcctcatgtgggagaaattcctgtggcttacagaaaagtgctgctgaaaacaattcaaccaagagtggaaaaatacctgtttgatgaatctggagaatttaaactttctgaagtgggacctgaacactctcttgctgaatacaaaatgtgcggatacaaacactggcctcagattgctcagtttgctccttctgcttctgctttctttggaatgagcagaattggaatggaagtgacaccttctggaacatggctgacatacacaggagcaatcaaactggatgataaagatccaaactttaaagatcaggtgattctgctgaacaaacacattgatgcttacaaaacatttcctgctagatgtgctacaactgatccttcttttctgggaagatacatgtctgctctttttgctgatgatttaaatcagttaacaggatatcacacagatttttcttctgaaatcattggataccagttgatgtgtcaaccaattttgttggctgaagctgaattggcaaaaaacgtgtctttgattcttggaacagtttcttggaatcttaaaaaacaaggatttgcatacgcaaatagaaatagatttctgtacattattaaactgatttttctgtggctgctgtggcctgtgacactggcttgctttgtgctggctgctgtgtacagaataaattggataacaggaggaattgcaattgcaatggcatgcttggtgggattgatgtggttgtcttactttattgcttcttttagactgttttacagatcctacttattatctgctggaatttttggagctatcacagatgtgttttacaaagaaaactcatacaaagtgccaacagacaattacataacaacatacgctagaatggctgctccaaaagaaatcatcttccttgaaggagaaacactttttggagatgatacagtgattgaagtgtccatgtttaatctgggaagatgcgatattaaagatctgccaaaagaaattacagtggcaacaagcagaacactgagctactacaaactgggagcaagccagagagtggcaggaggatccggtggtggcggcagcggcggcgaacagtacattaaatggccttggtacatttggcttggatttattgcaggattaattgcaattgtgatggtgacaattatgttatgttgtatgacatcatgttgttcttgtttaaaaggatgttgttcttgtggaagctgttgtaaatttgatgaagatgattctgaacctgtgttaaaaggagtgaaattgcattacacatgatgactcgagctggtactgcatgcacgcaatgctagctgcccctttcccgtcctgggtaccccgagtctcccccgacctcgggtcccaggtatgctcccacctccacctgccccactcaccacctctgctagttccagacacctcccaagcacgcagcaatgcagctcaaaacgcttagcctagccacacccccacgggaaacagcagtgattaacctttagcaataaacgaaagtttaactaagctatactaaccccagggttggtcaatttcgtgccagccacaccctggagctagcaaaaaaaaaaaaaaaaaaaaaaaaaaaaaagcatatgactaaaaaaaaaaaaaaaaaaaaaaaaaaaaaaaaaaaaaaaaaaaaaaaaaaaaaaaaaaaaaaaaaaaaaa

SEQ ID NO: 17505 - DNA, 1536 bp, Artificial Sequence
  Description of Artificial Sequence: Synthetic polynucleotide
ggcggctctggaggaggcggctccggaggctctcctgccagaatggctggaaatggaggagatgctgctctggctctgctgctgctggatagactgaatcagctggaaagcaaaatgagcggaaaaggacagcagcagcagggacaaacagtgacaaagaaatctgctgctgaagccagcaagaaaccaagacagaaaagaacagccacaaaagcctacaatgtgacacaggcctttggaagaaggggacctgaacagacacagggaaattttggagatcaggaactgatcagacagggaacagattacaaacactggcctcagatcgcccagtttgccccatctgcctctgccttctttggaatgagcagaattggaatggaagtgacaccttctggaacatggctgacatacacaggagccatcaaactggatgataaagatccaaattttaaagatcaggtgattctgctgaataaacacattgatgcctacaaaacatttccaccaacagaaccaaagaaagataaattcaaagctgctatggtgacaaacaacacatttacactgaaagtgcctcatgtgggagaaattcctgtggcttacagaaaagtgctgctgaaaacaattcaaccaagagtggaaaaatacctgtttgatgaatctggagaatttaaactttctgaagtgggacctgaacactctcttgctgaatactacattttctttgcttctttttactataagaggaatggatttgcatacgcaaatagaaatagatttctgtacattattaaactgatttttctgtggctgctgtggcctgtgacactggcttgctttgtgctggctgctgtgtacagaataaattggataacaggaggaattgcaattgcaatggcatgcttggtgggattgatgtggttgtcttactttattgcttcttttagactgttttacaactcttttcacacaactgatccatcttttctgggaagatacatgtctgctctttttgctgatgatttaaatcagttaacaggatatcacacagatttttcttctgaaatcattggataccagttgatgtgtcaaccaattttgttggctgaagctgaattggcaaaaaacgtgtctttgattcttggaacagtttcttggaatcttaagaaaaacggactgggaagatgcgatattaaagatctgccaaaagaaattacagtggcaacaagcagaacactgagctactacaaactgggagcaagccagagagtggcatacagatcctacttattatctgctggaatttttggagctatcacagatgtgttttacaaagaaaactcatacaaagtgccaacagacaattacataacaacatacgctagaatggctgctccaaaagaaatcatcttccttgaaggagaaacactttttggagatgatacagtgattgaagtggcaattattctggcatctttttctgcatccacaagaagaaggggaggaggatccggtggtggcggcagcggcggc

SEQ ID NO: 17506 - DNA, 2245 bp, Artificial Sequence
  Description of Artificial Sequence: Synthetic polynucleotide
attcttctggtccccacagactcagagagaacccgccaccatgtttgtttttcttgttttacttcctttagtctcttctcagtgtgtcaatttgacaggcggctctggaggaggcggctccggaggctctcctgccagaatggctggaaatggaggagatgctgctctggctctgctgctgctggatagactgaatcagctggaaagcaaaatgagcggaaaaggacagcagcagcagggacaaacagtgacaaagaaatctgctgctgaagccagcaagaaaccaagacagaaaagaacagccacaaaagcctacaatgtgacacaggcctttggaagaaggggacctgaacagacacagggaaattttggagatcaggaactgatcagacagggaacagattacaaacactggcctcagatcgcccagtttgccccatctgcctctgccttctttggaatgagcagaattggaatggaagtgacaccttctggaacatggctgacatacacaggagccatcaaactggatgataaagatccaaattttaaagatcaggtgattctgctgaataaacacattgatgcctacaaaacatttccaccaacagaaccaaagaaagataaattcaaagctgctatggtgacaaacaacacatttacactgaaagtgcctcatgtgggagaaattcctgtggcttacagaaaagtgctgctgaaaacaattcaaccaagagtggaaaaatacctgtttgatgaatctggagaatttaaactttctgaagtgggacctgaacactctcttgctgaatactacattttctttgcttctttttactataagaggaatggatttgcatacgcaaatagaaatagatttctgtacattattaaactgatttttctgtggctgctgtggcctgtgacactggcttgctttgtgctggctgctgtgtacagaataaattggataacaggaggaattgcaattgcaatggcatgcttggtgggattgatgtggttgtcttactttattgcttcttttagactgttttacaactcttttcacacaactgatccatcttttctgggaagatacatgtctgctctttttgctgatgatttaaatcagttaacaggatatcacacagatttttcttctgaaatcattggataccagttgatgtgtcaaccaattttgttggctgaagctgaattggcaaaaaacgtgtctttgattcttggaacagtttcttggaatcttaagaaaaacggactgggaagatgcgatattaaagatctgccaaaagaaattacagtggcaacaagcagaacactgagctactacaaactgggagcaagccagagagtggcatacagatcctacttattatctgctggaatttttggagctatcacagatgtgttttacaaagaaaactcatacaaagtgccaacagacaattacataacaacatacgctagaatggctgctccaaaagaaatcatcttccttgaaggagaaacactttttggagatgatacagtgattgaagtggcaattattctggcatctttttctgcatccacaagaagaaggggaggaggatccggtggtggcggcagcggcggcgaacagtacattaaatggccttggtacatttggcttggatttattgcaggattaattgcaattgtgatggtgacaattatgttatgttgtatgacatcatgttgttcttgtttaaaaggatgttgttcttgtggaagctgttgtaaatttgatgaagatgattctgaacctgtgttaaaaggagtgaaattgcattacacatgatgactcgagctggtactgcatgcacgcaatgctagctgcccctttcccgtcctgggtaccccgagtctcccccgacctcgggtcccaggtatgctcccacctccacctgccccactcaccacctctgctagttccagacacctcccaagcacgcagcaatgcagctcaaaacgcttagcctagccacacccccacgggaaacagcagtgattaacctttagcaataaacgaaagtttaactaagctatactaaccccagggttggtcaatttcgtgccagccacaccctggagctagcaaaaaaaaaaaaaaaaaaaaaaaaaaaaaagcatatgactaaaaaaaaaaaaaaaaaaaaaaaaaaaaaaaaaaaaaaaaaaaaaaaaaaaaaaaaaaaaaaaaaaaaaa

SEQ ID NO: 17507 - DNA, 1515 bp, Artificial Sequence
  Description of Artificial Sequence: Synthetic polynucleotide
ggcggctctggaggaggcggctccggaggctctcctgccagaatggctggaaatggaggagatgctgctctggctctgctgctgctggatagactgaatcagctggaaagcaaaatgagcggaaaaggacagcagcagcagggacaaacagtgacaaagaaatctgctgctgaagccagcaagaaaccaagacagaaaagaacagccacaaaagcctacaatgtgacacaggcctttggaagaaggggacctgaacagacacagggaaattttggagatcaggaactgatcagacagggaacagattacaaacactggcctcagatcgcccagtttgccccatctgcctctgccttctttggaatgagcagaattggaatggaagtgacaccttctggaacatggctgacatacacaggagccatcaaactggatgataaagatccaaattttaaagatcaggtgattctgctgaataaacacattgatgcctacaaaacatttccaccaacagaaccaaagaaagataaatttagagcttgcatggtgacaaacaacacatttacactgaaagtgcctcatgtgggagaaattcctgtggcttacagaaaagtgctgctgaaaacaattcaaccaagagtggaaaaatacctgtttgatgaatctggagaatttaaactttctgaagtgggacctgaacactctcttgctgaatactacattttctttgcttctttttactataaaagatgttttcacacaactgatccatcttttctgggaagatacatgtctgctctttttgctgatgatttaaatcagttaacaggatatcacacagatttttcttctgaaatcattggataccagttgatgtgtcaaccaattttgttggctgaagctgaattggcaaaaaacgtgtctttgattcttggaacagtttcttggaatcttaaaaagagatacttattatctgctggaatttttggagctatcacagatgtgttttacaaagaaaactcatacaaagtgccaacagacaattacataacaacatacgccagaatggctgctccaaaagaaatcatcttccttgaaggagaaacactttttggagatgatacagtgattgaagtggcaattattctggcatctttttctgcatccacaagaagaaggggaaaactgctggaacagtggaatcttgtgattggatttaatagaaatagatttctttacattattaaattgatttttctttggcttctttggcctgtgacacttgcttgctttgtgcttgctgctgtgtactctgaactggtgattggagctgtgattctgagaggacacctgagaattgctggacaccacctgggaagaacagtggcaacatcaagaacactttcttactacaaactgggagcttctcagagagtgaaaagatactctggcctgatgtggctgagctactttgctagatatgctggaggatccggtggtggcggcagcggcggc

SEQ ID NO: 17508 - DNA, 2224 bp, Artificial Sequence
  Description of Artificial Sequence: Synthetic polynucleotide
attcttctggtccccacagactcagagagaacccgccaccatgtttgtttttcttgttttacttcctttagtctcttctcagtgtgtcaatttgacaggcggctctggaggaggcggctccggaggctctcctgccagaatggctggaaatggaggagatgctgctctggctctgctgctgctggatagactgaatcagctggaaagcaaaatgagcggaaaaggacagcagcagcagggacaaacagtgacaaagaaatctgctgctgaagccagcaagaaaccaagacagaaaagaacagccacaaaagcctacaatgtgacacaggcctttggaagaaggggacctgaacagacacagggaaattttggagatcaggaactgatcagacagggaacagattacaaacactggcctcagatcgcccagtttgccccatctgcctctgccttctttggaatgagcagaattggaatggaagtgacaccttctggaacatggctgacatacacaggagccatcaaactggatgataaagatccaaattttaaagatcaggtgattctgctgaataaacacattgatgcctacaaaacatttccaccaacagaaccaaagaaagataaatttagagcttgcatggtgacaaacaacacatttacactgaaagtgcctcatgtgggagaaattcctgtggcttacagaaaagtgctgctgaaaacaattcaaccaagagtggaaaaatacctgtttgatgaatctggagaatttaaactttctgaagtgggacctgaacactctcttgctgaatactacattttctttgcttctttttactataaaagatgttttcacacaactgatccatcttttctgggaagatacatgtctgctctttttgctgatgatttaaatcagttaacaggatatcacacagatttttcttctgaaatcattggataccagttgatgtgtcaaccaattttgttggctgaagctgaattggcaaaaaacgtgtctttgattcttggaacagtttcttggaatcttaaaaagagatacttattatctgctggaatttttggagctatcacagatgtgttttacaaagaaaactcatacaaagtgccaacagacaattacataacaacatacgccagaatggctgctccaaaagaaatcatcttccttgaaggagaaacactttttggagatgatacagtgattgaagtggcaattattctggcatctttttctgcatccacaagaagaaggggaaaactgctggaacagtggaatcttgtgattggatttaatagaaatagatttctttacattattaaattgatttttctttggcttctttggcctgtgacacttgcttgctttgtgcttgctgctgtgtactctgaactggtgattggagctgtgattctgagaggacacctgagaattgctggacaccacctgggaagaacagtggcaacatcaagaacactttcttactacaaactgggagcttctcagagagtgaaaagatactctggcctgatgtggctgagctactttgctagatatgctggaggatccggtggtggcggcagcggcggcgaacagtacattaaatggccttggtacatttggcttggatttattgcaggattaattgcaattgtgatggtgacaattatgttatgttgtatgacatcatgttgttcttgtttaaaaggatgttgttcttgtggaagctgttgtaaatttgatgaagatgattctgaacctgtgttaaaaggagtgaaattgcattacacatgatgactcgagctggtactgcatgcacgcaatgctagctgcccctttcccgtcctgggtaccccgagtctcccccgacctcgggtcccaggtatgctcccacctccacctgccccactcaccacctctgctagttccagacacctcccaagcacgcagcaatgcagctcaaaacgcttagcctagccacacccccacgggaaacagcagtgattaacctttagcaataaacgaaagtttaactaagctatactaaccccagggttggtcaatttcgtgccagccacaccctggagctagcaaaaaaaaaaaaaaaaaaaaaaaaaaaaaagcatatgactaaaaaaaaaaaaaaaaaaaaaaaaaaaaaaaaaaaaaaaaaaaaaaaaaaaaaaaaaaaaaaaaaaaaaa

SEQ ID NO: 17509 - protein, 8 aa, Artificial Sequence
  Description of Artificial Sequence: Synthetic peptide
AADLDDFS

SEQ ID NO: 17510 - protein, 10 aa, Artificial Sequence
  Description of Artificial Sequence: Synthetic peptide
AADLDDFSKQ

SEQ ID NO: 17511 - protein, 11 aa, Artificial Sequence
  Description of Artificial Sequence: Synthetic peptide
AAEASKKPRQK

SEQ ID NO: 17512 - protein, 8 aa, Artificial Sequence
  Description of Artificial Sequence: Synthetic peptide
AGDSGFAA

SEQ ID NO: 17513 - protein, 10 aa, Artificial Sequence
  Description of Artificial Sequence: Synthetic peptide
AGDSGFAAYS

SEQ ID NO: 17514 - protein, 11 aa, Artificial Sequence
  Description of Artificial Sequence: Synthetic peptide
AGLPYGANKDG

SEQ ID NO: 17515 - protein, 11 aa, Artificial Sequence
  Description of Artificial Sequence: Synthetic peptide
AGNGGDAALAL

SEQ ID NO: 17516 - protein, 10 aa, Artificial Sequence
  Description of Artificial Sequence: Synthetic peptide
AIILASFSAS

SEQ ID NO: 17517 - protein, 8 aa, Artificial Sequence
  Description of Artificial Sequence: Synthetic peptide
AIKLDDKD

SEQ ID NO: 17518 - protein, 11 aa, Artificial Sequence
  Description of Artificial Sequence: Synthetic peptide
AIKLDDKDPNF

SEQ ID NO: 17519 - protein, 12 aa, Artificial Sequence
  Description of Artificial Sequence: Synthetic peptide
AIVLQLPQGTTL

SEQ ID NO: 17520 - protein, 9 aa, Artificial Sequence
  Description of Artificial Sequence: Synthetic peptide
ALNTPKDHI

SEQ ID NO: 17521 - protein, 10 aa, Artificial Sequence
  Description of Artificial Sequence: Synthetic peptide
AMACLVGLMW

SEQ ID NO: 17522 - protein, 12 aa, Artificial Sequence
  Description of Artificial Sequence: Synthetic peptide
APKEIIFLEGET

SEQ ID NO: 17523 - protein, 9 aa, Artificial Sequence
  Description of Artificial Sequence: Synthetic peptide
APSASAFFG

SEQ ID NO: 17524 - protein, 10 aa, Artificial Sequence
  Description of Artificial Sequence: Synthetic peptide
ARMAGNGGDA

SEQ ID NO: 17525 - protein, 11 aa, Artificial Sequence
  Description of Artificial Sequence: Synthetic peptide
ARMAGNGGDAA

SEQ ID NO: 17526 - protein, 12 aa, Artificial Sequence
  Description of Artificial Sequence: Synthetic peptide
ARMAGNGGDAAL

SEQ ID NO: 17527 - protein, 10 aa, Artificial Sequence
  Description of Artificial Sequence: Synthetic peptide
ASAFFGMSRI

SEQ ID NO: 17528 - protein, 11 aa, Artificial Sequence
  Description of Artificial Sequence: Synthetic peptide
ASKKPRQKRTA

SEQ ID NO: 17529 - protein, 12 aa, Artificial Sequence
  Description of Artificial Sequence: Synthetic peptide
ASKKPRQKRTAT

SEQ ID NO: 17530 - protein, 11 aa, Artificial Sequence
  Description of Artificial Sequence: Synthetic peptide
ASQRVAGDSGF

SEQ ID NO: 17531 - protein, 11 aa, Artificial Sequence
  Description of Artificial Sequence: Synthetic peptide
ATKAYNVTQAF

SEQ ID NO: 17532 - protein, 11 aa, Artificial Sequence
  Description of Artificial Sequence: Synthetic peptide
ATSRTLSYYKL

SEQ ID NO: 17533 - protein, 11 aa, Artificial Sequence
  Description of Artificial Sequence: Synthetic peptide
AVILRGHLRIA

SEQ ID NO: 17534 - protein, 9 aa, Artificial Sequence
  Description of Artificial Sequence: Synthetic peptide
AVYRINWIT

SEQ ID NO: 17535 - protein, 10 aa, Artificial Sequence
  Description of Artificial Sequence: Synthetic peptide
AYKTFPPTEP

SEQ ID NO: 17536 - protein, 11 aa, Artificial Sequence
  Description of Artificial Sequence: Synthetic peptide
AYKTFPPTEPK

SEQ ID NO: 17537 - protein, 12 aa, Artificial Sequence
  Description of Artificial Sequence: Synthetic peptide
AYKTFPPTEPKK

SEQ ID NO: 17538 - protein, 11 aa, Artificial Sequence
  Description of Artificial Sequence: Synthetic peptide
AYNVTQAFGRR

SEQ ID NO: 17539 - protein, 11 aa, Artificial Sequence
  Description of Artificial Sequence: Synthetic peptide
AYSRYRIGNYK

SEQ ID NO: 17540 - protein, 10 aa, Artificial Sequence
  Description of Artificial Sequence: Synthetic peptide
DAYKTFPPTE

SEQ ID NO: 17541 - protein, 11 aa, Artificial Sequence
  Description of Artificial Sequence: Synthetic peptide
DDFSKQLQQSM

SEQ ID NO: 17542 - protein, 9 aa, Artificial Sequence
  Description of Artificial Sequence: Synthetic peptide
DDKDPNFKD

SEQ ID NO: 17543 - protein, 11 aa, Artificial Sequence
  Description of Artificial Sequence: Synthetic peptide
DDKDPNFKDQV

SEQ ID NO: 17544 - protein, 12 aa, Artificial Sequence
  Description of Artificial Sequence: Synthetic peptide
DDKDPNFKDQVI

SEQ ID NO: 17545 - protein, 8 aa, Artificial Sequence
  Description of Artificial Sequence: Synthetic peptide
DHIGTRNP

SEQ ID NO: 17546 - protein, 10 aa, Artificial Sequence
  Description of Artificial Sequence: Synthetic peptide
DHSSSSDNIA

SEQ ID NO: 17547 - protein, 12 aa, Artificial Sequence
  Description of Artificial Sequence: Synthetic peptide
DIKDLPKEITVA

SEQ ID NO: 17548 - protein, 11 aa, Artificial Sequence
  Description of Artificial Sequence: Synthetic peptide
DKDPNFKDQVI

SEQ ID NO: 17549 - protein, 8 aa, Artificial Sequence
  Description of Artificial Sequence: Synthetic peptide
DKKKKADE

SEQ ID NO: 17550 - protein, 12 aa, Artificial Sequence
  Description of Artificial Sequence: Synthetic peptide
DLPKEITVATSR

SEQ ID NO: 17551 - protein, 8 aa, Artificial Sequence
  Description of Artificial Sequence: Synthetic peptide
DLSPRWYF

SEQ ID NO: 17552 - protein, 11 aa, Artificial Sequence
  Description of Artificial Sequence: Synthetic peptide
DLSPRWYFYYL

SEQ ID NO: 17553 - protein, 11 aa, Artificial Sequence
  Description of Artificial Sequence: Synthetic peptide
DPSFLGRYMSA

SEQ ID NO: 17554 - protein, 10 aa, Artificial Sequence
  Description of Artificial Sequence: Synthetic peptide
DSGFAAYSRY

SEQ ID NO: 17555 - protein, 11 aa, Artificial Sequence
  Description of Artificial Sequence: Synthetic peptide
DSGFAAYSRYR

SEQ ID NO: 17556 - protein, 11 aa, Artificial Sequence
  Description of Artificial Sequence: Synthetic peptide
DSNGTITVEEL

SEQ ID NO: 17557 - protein, 8 aa, Artificial Sequence
  Description of Artificial Sequence: Synthetic peptide
DYKHWPQI

SEQ ID NO: 17558 - protein, 9 aa, Artificial Sequence
  Description of Artificial Sequence: Synthetic peptide
DYKHWPQIA

SEQ ID NO: 17559 - protein, 10 aa, Artificial Sequence
  Description of Artificial Sequence: Synthetic peptide
DYKHWPQIAQ

SEQ ID NO: 17560 - protein, 9 aa, Artificial Sequence
  Description of Artificial Sequence: Synthetic peptide
EAGLPYGAN

SEQ ID NO: 17561 - protein, 11 aa, Artificial Sequence
  Description of Artificial Sequence: Synthetic peptide
EIPVAYRKVLL

SEQ ID NO: 17562 - protein, 12 aa, Artificial Sequence
  Description of Artificial Sequence: Synthetic peptide
EITVATSRTLSY

SEQ ID NO: 17563 - protein, 10 aa, Artificial Sequence
  Description of Artificial Sequence: Synthetic peptide
ELIRQGTDYK

SEQ ID NO: 17564 - protein, 12 aa, Artificial Sequence
  Description of Artificial Sequence: Synthetic peptide
EPKKDKKKKADE

SEQ ID NO: 17565 - protein, 11 aa, Artificial Sequence
  Description of Artificial Sequence: Synthetic peptide
EQWNLVIGFLF

SEQ ID NO: 17566 - protein, 12 aa, Artificial Sequence
  Description of Artificial Sequence: Synthetic peptide
EQWNLVIGFLFL

SEQ ID NO: 17567 - protein, 11 aa, Artificial Sequence
  Description of Artificial Sequence: Synthetic peptide
ESELVIGAVIL

SEQ ID NO: 17568 - protein, 12 aa, Artificial Sequence
  Description of Artificial Sequence: Synthetic peptide
ESELVIGAVILR

SEQ ID NO: 17569 - protein, 11 aa, Artificial Sequence
  Description of Artificial Sequence: Synthetic peptide
ETNILLNVPLH

SEQ ID NO: 17570 - protein, 11 aa, Artificial Sequence
  Description of Artificial Sequence: Synthetic peptide
ETQALPQRQKK

SEQ ID NO: 17571 - protein, 10 aa, Artificial Sequence
  Description of Artificial Sequence: Synthetic peptide
EVGPEHSLAE

SEQ ID NO: 17572 - protein, 10 aa, Artificial Sequence
  Description of Artificial Sequence: Synthetic peptide
EVTPSGTWLT

SEQ ID NO: 17573 - protein, 12 aa, Artificial Sequence
  Description of Artificial Sequence: Synthetic peptide
FAAYSRYRIGNY

SEQ ID NO: 17574 - protein, 11 aa, Artificial Sequence
  Description of Artificial Sequence: Synthetic peptide
FAPSASAFFGM

SEQ ID NO: 17575 - protein, 8 aa, Artificial Sequence
  Description of Artificial Sequence: Synthetic peptide
FARTRSMW

SEQ ID NO: 17576 - protein, 8 aa, Artificial Sequence
  Description of Artificial Sequence: Synthetic peptide
FDESGEFK

SEQ ID NO: 17577 - protein, 8 aa, Artificial Sequence
  Description of Artificial Sequence: Synthetic peptide
FGMSRIGM

SEQ ID NO: 17578 - protein, 11 aa, Artificial Sequence
  Description of Artificial Sequence: Synthetic peptide
FLWLLWPVTLA

SEQ ID NO: 17579 - protein, 12 aa, Artificial Sequence
  Description of Artificial Sequence: Synthetic peptide
FLYIIKLIFLWL

SEQ ID NO: 17580 - protein, 12 aa, Artificial Sequence
  Description of Artificial Sequence: Synthetic peptide
FPPTEPKKDKKK

SEQ ID NO: 17581 - protein, 10 aa, Artificial Sequence
  Description of Artificial Sequence: Synthetic peptide
FRLFARTRSM

SEQ ID NO: 17582 - protein, 11 aa, Artificial Sequence
  Description of Artificial Sequence: Synthetic peptide
FVLAAVYRINW

SEQ ID NO: 17583 - protein, 11 aa, Artificial Sequence
  Description of Artificial Sequence: Synthetic peptide
FYYLGTGPEAG

SEQ ID NO: 17584 - protein, 12 aa, Artificial Sequence
  Description of Artificial Sequence: Synthetic peptide
FYYLGTGPEAGL

SEQ ID NO: 17585 - protein, 11 aa, Artificial Sequence
  Description of Artificial Sequence: Synthetic peptide
GANKDGIIWVA

SEQ ID NO: 17586 - protein, 10 aa, Artificial Sequence
  Description of Artificial Sequence: Synthetic peptide
GDAALALLLL

SEQ ID NO: 17587 - protein, 8 aa, Artificial Sequence
  Description of Artificial Sequence: Synthetic peptide
GDSGFAAY

SEQ ID NO: 17588 - protein, 10 aa, Artificial Sequence
  Description of Artificial Sequence: Synthetic peptide
GFLFLTWICL

SEQ ID NO: 17589 - protein, 11 aa, Artificial Sequence
  Description of Artificial Sequence: Synthetic peptide
GGDAALALLLL

SEQ ID NO: 17590 - protein, 8 aa, Artificial Sequence
  Description of Artificial Sequence: Synthetic peptide
GHHLGRCD

SEQ ID NO: 17591 - protein, 9 aa, Artificial Sequence
  Description of Artificial Sequence: Synthetic peptide
GIAIAMACL

SEQ ID NO: 17592 - protein, 8 aa, Artificial Sequence
  Description of Artificial Sequence: Synthetic peptide
GLPYGANK

SEQ ID NO: 17593 - protein, 11 aa, Artificial Sequence
  Description of Artificial Sequence: Synthetic peptide
GLPYGANKDGI

SEQ ID NO: 17594 - protein, 10 aa, Artificial Sequence
  Description of Artificial Sequence: Synthetic peptide
GNGGDAALAL

SEQ ID NO: 17595 - protein, 12 aa, Artificial Sequence
  Description of Artificial Sequence: Synthetic peptide
GNGGDAALALLL

SEQ ID NO: 17596 - protein, 11 aa, Artificial Sequence
  Description of Artificial Sequence: Synthetic peptide
GRCDIKDLPKE

SEQ ID NO: 17597 - protein, 11 aa, Artificial Sequence
  Description of Artificial Sequence: Synthetic peptide
GSRGGSQASSR

SEQ ID NO: 17598 - protein, 10 aa, Artificial Sequence
  Description of Artificial Sequence: Synthetic peptide
GSSRGTSPAR

SEQ ID NO: 17599 - protein, 10 aa, Artificial Sequence
  Description of Artificial Sequence: Synthetic peptide
GTILTRPLLE

SEQ ID NO: 17600 - protein, 11 aa, Artificial Sequence
  Description of Artificial Sequence: Synthetic peptide
GTITVEELKKL

SEQ ID NO: 17601 - protein, 10 aa, Artificial Sequence
  Description of Artificial Sequence: Synthetic peptide
GTRNPANNAA

SEQ ID NO: 17602 - protein, 8 aa, Artificial Sequence
  Description of Artificial Sequence: Synthetic peptide
HGTILTRP

SEQ ID NO: 17603 - protein, 9 aa, Artificial Sequence
  Description of Artificial Sequence: Synthetic peptide
HGTILTRPL

SEQ ID NO: 17604 - protein, 10 aa, Artificial Sequence
  Description of Artificial Sequence: Synthetic peptide
HGTILTRPLL

SEQ ID NO: 17605 - protein, 8 aa, Artificial Sequence
  Description of Artificial Sequence: Synthetic peptide
HHLGRCDI

SEQ ID NO: 17606 - protein, 10 aa, Artificial Sequence
  Description of Artificial Sequence: Synthetic peptide
HIDAYKTFPP

SEQ ID NO: 17607 - protein, 11 aa, Artificial Sequence
  Description of Artificial Sequence: Synthetic peptide
HLRIAGHHLGR

SEQ ID NO: 17608 - protein, 8 aa, Artificial Sequence
  Description of Artificial Sequence: Synthetic peptide
HSSSSDNI

SEQ ID NO: 17609 - protein, 11 aa, Artificial Sequence
  Description of Artificial Sequence: Synthetic peptide
HSSSSDNIALL

SEQ ID NO: 17610 - protein, 12 aa, Artificial Sequence
  Description of Artificial Sequence: Synthetic peptide
HTTDPSFLGRYM

SEQ ID NO: 17611 - protein, 11 aa, Artificial Sequence
  Description of Artificial Sequence: Synthetic peptide
HVGEIPVAYRK

SEQ ID NO: 17612 - protein, 12 aa, Artificial Sequence
  Description of Artificial Sequence: Synthetic peptide
HVGEIPVAYRKV

SEQ ID NO: 17613 - protein, 10 aa, Artificial Sequence
  Description of Artificial Sequence: Synthetic peptide
IAQFAPSASA

SEQ ID NO: 17614 - protein, 11 aa, Artificial Sequence
  Description of Artificial Sequence: Synthetic peptide
IAQFAPSASAF

SEQ ID NO: 17615 - protein, 8 aa, Artificial Sequence
  Description of Artificial Sequence: Synthetic peptide
IASFRLFA

SEQ ID NO: 17616 - protein, 11 aa, Artificial Sequence
  Description of Artificial Sequence: Synthetic peptide
IGMEVTPSGTW

SEQ ID NO: 17617 - protein, 10 aa, Artificial Sequence
  Description of Artificial Sequence: Synthetic peptide
IIKLIFLWLL

SEQ ID NO: 17618 - protein, 11 aa, Artificial Sequence
  Description of Artificial Sequence: Synthetic peptide
IIKLIFLWLLW

SEQ ID NO: 17619 - protein, 9 aa, Artificial Sequence
  Description of Artificial Sequence: Synthetic peptide
IIWVATEGA

SEQ ID NO: 17620 - protein, 10 aa, Artificial Sequence
  Description of Artificial Sequence: Synthetic peptide
IIWVATEGAL

SEQ ID NO: 17621 - protein, 10 aa, Artificial Sequence
  Description of Artificial Sequence: Synthetic peptide
IKDLPKEITV

SEQ ID NO: 17622 - protein, 11 aa, Artificial Sequence
  Description of Artificial Sequence: Synthetic peptide
IKDLPKEITVA

SEQ ID NO: 17623 - protein, 11 aa, Artificial Sequence
  Description of Artificial Sequence: Synthetic peptide
ILLNVPLHGTI

SEQ ID NO: 17624 - protein, 11 aa, Artificial Sequence
  Description of Artificial Sequence: Synthetic peptide
ILTRPLLESEL

SEQ ID NO: 17625 - protein, 10 aa, Artificial Sequence
  Description of Artificial Sequence: Synthetic peptide
ITGGIAIAMA

SEQ ID NO: 17626 - protein, 12 aa, Artificial Sequence
  Description of Artificial Sequence: Synthetic peptide
ITVATSRTLSYY

SEQ ID NO: 17627 - protein, 11 aa, Artificial Sequence
  Description of Artificial Sequence: Synthetic peptide
ITVEELKKLLE

SEQ ID NO: 17628 - protein, 11 aa, Artificial Sequence
  Description of Artificial Sequence: Synthetic peptide
IVLQLPQGTTL

SEQ ID NO: 17629 - protein, 12 aa, Artificial Sequence
  Description of Artificial Sequence: Synthetic peptide
KAYNVTQAFGRR

SEQ ID NO: 17630 - protein, 9 aa, Artificial Sequence
  Description of Artificial Sequence: Synthetic peptide
KDGIIWVAT

SEQ ID NO: 17631 - protein, 9 aa, Artificial Sequence
  Description of Artificial Sequence: Synthetic peptide
KDHIGTRNP

SEQ ID NO: 17632 - protein, 10 aa, Artificial Sequence
  Description of Artificial Sequence: Synthetic peptide
KDLPKEITVA

SEQ ID NO: 17633 - protein, 11 aa, Artificial Sequence
  Description of Artificial Sequence: Synthetic peptide
KDLSPRWYFYY

SEQ ID NO: 17634 - protein, 10 aa, Artificial Sequence
  Description of Artificial Sequence: Synthetic peptide
KEIIFLEGET

SEQ ID NO: 17635 - protein, 10 aa, Artificial Sequence
  Description of Artificial Sequence: Synthetic peptide
KEITVATSRT

SEQ ID NO: 17636 - protein, 10 aa, Artificial Sequence
  Description of Artificial Sequence: Synthetic peptide
KHWPQIAQFA

SEQ ID NO: 17637 - protein, 11 aa, Artificial Sequence
  Description of Artificial Sequence: Synthetic peptide
KHWPQIAQFAP

SEQ ID NO: 17638 - protein, 9 aa, Artificial Sequence
  Description of Artificial Sequence: Synthetic peptide
KKDKKKKAD

SEQ ID NO: 17639 - protein, 9 aa, Artificial Sequence
  Description of Artificial Sequence: Synthetic peptide
KKKADETQA

SEQ ID NO: 17640 - protein, 11 aa, Artificial Sequence
  Description of Artificial Sequence: Synthetic peptide
KKKKADETQAL

SEQ ID NO: 17641 - protein, 11 aa, Artificial Sequence
  Description of Artificial Sequence: Synthetic peptide
KLDDKDPNFKD

SEQ ID NO: 17642 - protein, 11 aa, Artificial Sequence
  Description of Artificial Sequence: Synthetic peptide
KLIFLWLLWPV

SEQ ID NO: 17643 - protein, 11 aa, Artificial Sequence
  Description of Artificial Sequence: Synthetic peptide
KPRQKRTATKA

SEQ ID NO: 17644 - protein, 11 aa, Artificial Sequence
  Description of Artificial Sequence: Synthetic peptide
KSAAEASKKPR

SEQ ID NO: 17645 - protein, 11 aa, Artificial Sequence
  Description of Artificial Sequence: Synthetic peptide
KTFPPTEPKKD

SEQ ID NO: 17646 - protein, 12 aa, Artificial Sequence
  Description of Artificial Sequence: Synthetic peptide
KTFPPTEPKKDK

SEQ ID NO: 17647 - protein, 8 aa, Artificial Sequence
  Description of Artificial Sequence: Synthetic peptide
KVPTDNYI

SEQ ID NO: 17648 - protein, 9 aa, Artificial Sequence
  Description of Artificial Sequence: Synthetic peptide
KVPTDNYIT

SEQ ID NO: 17649 - protein, 8 aa, Artificial Sequence
  Description of Artificial Sequence: Synthetic peptide
LDDKDPNF

SEQ ID NO: 17650 - protein, 9 aa, Artificial Sequence
  Description of Artificial Sequence: Synthetic peptide
LDDKDPNFK

SEQ ID NO: 17651 - protein, 8 aa, Artificial Sequence
  Description of Artificial Sequence: Synthetic peptide
LDRLNQLE

SEQ ID NO: 17652 - protein, 10 aa, Artificial Sequence
  Description of Artificial Sequence: Synthetic peptide
LESELVIGAV

SEQ ID NO: 17653 - protein, 12 aa, Artificial Sequence
  Description of Artificial Sequence: Synthetic peptide
LESELVIGAVIL

SEQ ID NO: 17654 - protein, 9 aa, Artificial Sequence
  Description of Artificial Sequence: Synthetic peptide
LFARTRSMW

SEQ ID NO: 17655 - protein, 11 aa, Artificial Sequence
  Description of Artificial Sequence: Synthetic peptide
LFARTRSMWSF

SEQ ID NO: 17656 - protein, 9 aa, Artificial Sequence
  Description of Artificial Sequence: Synthetic peptide
LGTGPEAGL

SEQ ID NO: 17657 - protein, 9 aa, Artificial Sequence
  Description of Artificial Sequence: Synthetic peptide
LHGTILTRP

SEQ ID NO: 17658 - protein, 10 aa, Artificial Sequence
  Description of Artificial Sequence: Synthetic peptide
LHGTILTRPL

SEQ ID NO: 17659 - protein, 11 aa, Artificial Sequence
  Description of Artificial Sequence: Synthetic peptide
LHGTILTRPLL

SEQ ID NO: 17660 - protein, 8 aa, Artificial Sequence
  Description of Artificial Sequence: Synthetic peptide
LIFLWLLW

SEQ ID NO: 17661 - protein, 10 aa, Artificial Sequence
  Description of Artificial Sequence: Synthetic peptide
LIFLWLLWPV

SEQ ID NO: 17662 - protein, 9 aa, Artificial Sequence
  Description of Artificial Sequence: Synthetic peptide
LIRQGTDYK

SEQ ID NO: 17663 - protein, 11 aa, Artificial Sequence
  Description of Artificial Sequence: Synthetic peptide
LIRQGTDYKHW

SEQ ID NO: 17664 - protein, 11 aa, Artificial Sequence
  Description of Artificial Sequence: Synthetic peptide
LLESELVIGAV

SEQ ID NO: 17665 - protein, 11 aa, Artificial Sequence
  Description of Artificial Sequence: Synthetic peptide
LLNKHIDAYKT

SEQ ID NO: 17666 - protein, 12 aa, Artificial Sequence
  Description of Artificial Sequence: Synthetic peptide
LLNKHIDAYKTF

SEQ ID NO: 17667 - protein, 10 aa, Artificial Sequence
  Description of Artificial Sequence: Synthetic peptide
LLNVPLHGTI

SEQ ID NO: 17668 - protein, 11 aa, Artificial Sequence
  Description of Artificial Sequence: Synthetic peptide
LLNVPLHGTIL

SEQ ID NO: 17669 - protein, 10 aa, Artificial Sequence
  Description of Artificial Sequence: Synthetic peptide
LLPAADLDDF

SEQ ID NO: 17670 - protein, 11 aa, Artificial Sequence
  Description of Artificial Sequence: Synthetic peptide
LLQFAYANRNR

SEQ ID NO: 17671 - protein, 11 aa, Artificial Sequence
  Description of Artificial Sequence: Synthetic peptide
LLWPVTLACFV

SEQ ID NO: 17672 - protein, 12 aa, Artificial Sequence
  Description of Artificial Sequence: Synthetic peptide
LLWPVTLACFVL

SEQ ID NO: 17673 - protein, 11 aa, Artificial Sequence
  Description of Artificial Sequence: Synthetic peptide
LMWLSYFIASF

SEQ ID NO: 17674 - protein, 9 aa, Artificial Sequence
  Description of Artificial Sequence: Synthetic peptide
LNVPLHGTI

SEQ ID NO: 17675 - protein, 10 aa, Artificial Sequence
  Description of Artificial Sequence: Synthetic peptide
LNVPLHGTIL

SEQ ID NO: 17676 - protein, 10 aa, Artificial Sequence
  Description of Artificial Sequence: Synthetic peptide
LPKEITVATS

SEQ ID NO: 17677 - protein, 11 aa, Artificial Sequence
  Description of Artificial Sequence: Synthetic peptide
LPKEITVATSR

SEQ ID NO: 17678 - protein, 8 aa, Artificial Sequence
  Description of Artificial Sequence: Synthetic peptide
LPQGTTLP

SEQ ID NO: 17679 - protein, 9 aa, Artificial Sequence
  Description of Artificial Sequence: Synthetic peptide
LPQGTTLPK

SEQ ID NO: 17680 - protein, 10 aa, Artificial Sequence
  Description of Artificial Sequence: Synthetic peptide
LPQGTTLPKG

SEQ ID NO: 17681 - protein, 11 aa, Artificial Sequence
  Description of Artificial Sequence: Synthetic peptide
LPQRQKKQQTV

SEQ ID NO: 17682 - protein, 11 aa, Artificial Sequence
  Description of Artificial Sequence: Synthetic peptide
LPYGANKDGII

SEQ ID NO: 17683 - protein, 12 aa, Artificial Sequence
  Description of Artificial Sequence: Synthetic peptide
LPYGANKDGIIW

SEQ ID NO: 17684 - protein, 11 aa, Artificial Sequence
  Description of Artificial Sequence: Synthetic peptide
LQLPQGTTLPK

SEQ ID NO: 17685 - protein, 8 aa, Artificial Sequence
  Description of Artificial Sequence: Synthetic peptide
LQQSMSSA

SEQ ID NO: 17686 - protein, 10 aa, Artificial Sequence
  Description of Artificial Sequence: Synthetic peptide
LSYFIASFRL

SEQ ID NO: 17687 - protein, 11 aa, Artificial Sequence
  Description of Artificial Sequence: Synthetic peptide
LSYYKLGASQR

SEQ ID NO: 17688 - protein, 10 aa, Artificial Sequence
  Description of Artificial Sequence: Synthetic peptide
LTRPLLESEL

SEQ ID NO: 17689 - protein, 8 aa, Artificial Sequence
  Description of Artificial Sequence: Synthetic peptide
LTYTGAIK

SEQ ID NO: 17690 - protein, 10 aa, Artificial Sequence
  Description of Artificial Sequence: Synthetic peptide
LWPVTLACFV

SEQ ID NO: 17691 - protein, 11 aa, Artificial Sequence
  Description of Artificial Sequence: Synthetic peptide
LWPVTLACFVL

SEQ ID NO: 17692 - protein, 12 aa, Artificial Sequence
  Description of Artificial Sequence: Synthetic peptide
MAGNGGDAALAL

SEQ ID NO: 17693 - protein, 11 aa, Artificial Sequence
  Description of Artificial Sequence: Synthetic peptide
MEVTPSGTWLT

SEQ ID NO: 17694 - protein, 11 aa, Artificial Sequence
  Description of Artificial Sequence: Synthetic peptide
MWLSYFIASFR

SEQ ID NO: 17695 - protein, 10 aa, Artificial Sequence
  Description of Artificial Sequence: Synthetic peptide
MWSFNPETNI

SEQ ID NO: 17696 - protein, 11 aa, Artificial Sequence
  Description of Artificial Sequence: Synthetic peptide
MWSFNPETNIL

SEQ ID NO: 17697 - protein, 12 aa, Artificial Sequence
  Description of Artificial Sequence: Synthetic peptide
MWSFNPETNILL

SEQ ID NO: 17698 - protein, 10 aa, Artificial Sequence
  Description of Artificial Sequence: Synthetic peptide
NFKDQVILLN

SEQ ID NO: 17699 - protein, 11 aa, Artificial Sequence
  Description of Artificial Sequence: Synthetic peptide
NFKDQVILLNK

SEQ ID NO: 17700 - protein, 11 aa, Artificial Sequence
  Description of Artificial Sequence: Synthetic peptide
NLVIGFLFLTW

SEQ ID NO: 17701 - protein, 12 aa, Artificial Sequence
  Description of Artificial Sequence: Synthetic peptide
NPANNAAIVLQL

SEQ ID NO: 17702 - protein, 12 aa, Artificial Sequence
  Description of Artificial Sequence: Synthetic peptide
NPETNILLNVPL

SEQ ID NO: 17703 - protein, 12 aa, Artificial Sequence
  Description of Artificial Sequence: Synthetic peptide
NRFLYIIKLIFL

SEQ ID NO: 17704 - protein, 9 aa, Artificial Sequence
  Description of Artificial Sequence: Synthetic peptide
NSSRNSTPG

SEQ ID NO: 17705 - protein, 11 aa, Artificial Sequence
  Description of Artificial Sequence: Synthetic peptide
NTDHSSSSDNI

SEQ ID NO: 17706 - protein, 8 aa, Artificial Sequence
  Description of Artificial Sequence: Synthetic peptide
NVPLHGTI

SEQ ID NO: 17707 - protein, 10 aa, Artificial Sequence
  Description of Artificial Sequence: Synthetic peptide
NWITGGIAIA

SEQ ID NO: 17708 - protein, 10 aa, Artificial Sequence
  Description of Artificial Sequence: Synthetic peptide
PARMAGNGGD

SEQ ID NO: 17709 - protein, 11 aa, Artificial Sequence
  Description of Artificial Sequence: Synthetic peptide
PETNILLNVPL

SEQ ID NO: 17710 - protein, 8 aa, Artificial Sequence
  Description of Artificial Sequence: Synthetic peptide
PHVGEIPV

SEQ ID NO: 17711 - protein, 8 aa, Artificial Sequence
  Description of Artificial Sequence: Synthetic peptide
PKDHIGTR

SEQ ID NO: 17712 - protein, 8 aa, Artificial Sequence
  Description of Artificial Sequence: Synthetic peptide
PKEIIFLE

SEQ ID NO: 17713 - protein, 9 aa, Artificial Sequence
  Description of Artificial Sequence: Synthetic peptide
PKKDKKKKA

SEQ ID NO: 17714 - protein, 11 aa, Artificial Sequence
  Description of Artificial Sequence: Synthetic peptide
PKKDKKKKADE

SEQ ID NO: 17715 - protein, 10 aa, Artificial Sequence
  Description of Artificial Sequence: Synthetic peptide
PLLESELVIG

SEQ ID NO: 17716 - protein, 8 aa, Artificial Sequence
  Description of Artificial Sequence: Synthetic peptide
PPTEPKKD

SEQ ID NO: 17717 - protein, 9 aa, Artificial Sequence
  Description of Artificial Sequence: Synthetic peptide
PPTEPKKDK

SEQ ID NO: 17718 - protein, 8 aa, Artificial Sequence
  Description of Artificial Sequence: Synthetic peptide
PQGTTLPK

SEQ ID NO: 17719 - protein, 12 aa, Artificial Sequence
  Description of Artificial Sequence: Synthetic peptide
PQIAQFAPSASA

SEQ ID NO: 17720 - protein, 11 aa, Artificial Sequence
  Description of Artificial Sequence: Synthetic peptide
PSFLGRYMSAL

SEQ ID NO: 17721 - protein, 8 aa, Artificial Sequence
  Description of Artificial Sequence: Synthetic peptide
PTEPKKDK

SEQ ID NO: 17722 - protein, 9 aa, Artificial Sequence
  Description of Artificial Sequence: Synthetic peptide
PTEPKKDKK

SEQ ID NO: 17723 - protein, 8 aa, Artificial Sequence
  Description of Artificial Sequence: Synthetic peptide
PVAYRKVL

SEQ ID NO: 17724 - protein, 11 aa, Artificial Sequence
  Description of Artificial Sequence: Synthetic peptide
PYGANKDGIIW

SEQ ID NO: 17725 - protein, 11 aa, Artificial Sequence
  Description of Artificial Sequence: Synthetic peptide
QASSRSSSRSR

SEQ ID NO: 17726 - protein, 10 aa, Artificial Sequence
  Description of Artificial Sequence: Synthetic peptide
QGNFGDQELI

SEQ ID NO: 17727 - protein, 9 aa, Artificial Sequence
  Description of Artificial Sequence: Synthetic peptide
QGTTLPKGF

SEQ ID NO: 17728 - protein, 8 aa, Artificial Sequence
  Description of Artificial Sequence: Synthetic peptide
QLMCQPIL

SEQ ID NO: 17729 - protein, 9 aa, Artificial Sequence
  Description of Artificial Sequence: Synthetic peptide
QQGQTVTKK

SEQ ID NO: 17730 - protein, 10 aa, Artificial Sequence
  Description of Artificial Sequence: Synthetic peptide
QQQGQTVTKK

SEQ ID NO: 17731 - protein, 11 aa, Artificial Sequence
  Description of Artificial Sequence: Synthetic peptide
QQQQGQTVTKK

SEQ ID NO: 17732 - protein, 11 aa, Artificial Sequence
  Description of Artificial Sequence: Synthetic peptide
QRQKKQQTVTL

SEQ ID NO: 17733 - protein, 12 aa, Artificial Sequence
  Description of Artificial Sequence: Synthetic peptide
QRVAGDSGFAAY

SEQ ID NO: 17734 - protein, 9 aa, Artificial Sequence
  Description of Artificial Sequence: Synthetic peptide
QTVTLLPAA

SEQ ID NO: 17735 - protein, 12 aa, Artificial Sequence
  Description of Artificial Sequence: Synthetic peptide
QVILLNKHIDAY

SEQ ID NO: 17736 - protein, 9 aa, Artificial Sequence
  Description of Artificial Sequence: Synthetic peptide
RCDIKDLPK

SEQ ID NO: 17737 - protein, 12 aa, Artificial Sequence
  Description of Artificial Sequence: Synthetic peptide
RFLYIIKLIFLW

SEQ ID NO: 17738 - protein, 11 aa, Artificial Sequence
  Description of Artificial Sequence: Synthetic peptide
RGHLRIAGHHL

SEQ ID NO: 17739 - protein, 10 aa, Artificial Sequence
  Description of Artificial Sequence: Synthetic peptide
RGPEQTQGNF

SEQ ID NO: 17740 - protein, 12 aa, Artificial Sequence
  Description of Artificial Sequence: Synthetic peptide
RIGMEVTPSGTW

SEQ ID NO: 17741 - protein, 10 aa, Artificial Sequence
  Description of Artificial Sequence: Synthetic peptide
RINWITGGIA

SEQ ID NO: 17742 - protein, 11 aa, Artificial Sequence
  Description of Artificial Sequence: Synthetic peptide
RINWITGGIAI

SEQ ID NO: 17743 - protein, 12 aa, Artificial Sequence
  Description of Artificial Sequence: Synthetic peptide
RINWITGGIAIA

SEQ ID NO: 17744 - protein, 12 aa, Artificial Sequence
  Description of Artificial Sequence: Synthetic peptide
RLFARTRSMWSF

SEQ ID NO: 17745 - protein, 10 aa, Artificial Sequence
  Description of Artificial Sequence: Synthetic peptide
RMAGNGGDAA

SEQ ID NO: 17746 - protein, 11 aa, Artificial Sequence
  Description of Artificial Sequence: Synthetic peptide
RMAGNGGDAAL

SEQ ID NO: 17747 - protein, 11 aa, Artificial Sequence
  Description of Artificial Sequence: Synthetic peptide
RNPANNAAIVL

SEQ ID NO: 17748 - protein, 11 aa, Artificial Sequence
  Description of Artificial Sequence: Synthetic peptide
RNRFLYIIKLI

SEQ ID NO: 17749 - protein, 12 aa, Artificial Sequence
  Description of Artificial Sequence: Synthetic peptide
RNRFLYIIKLIF

SEQ ID NO: 17750 - protein, 10 aa, Artificial Sequence
  Description of Artificial Sequence: Synthetic peptide
RPLLESELVI

SEQ ID NO: 17751 - protein, 12 aa, Artificial Sequence
  Description of Artificial Sequence: Synthetic peptide
RPLLESELVIGA

SEQ ID NO: 17752 - protein, 11 aa, Artificial Sequence
  Description of Artificial Sequence: Synthetic peptide
RQKKQQTVTLL

SEQ ID NO: 17753 - protein, 12 aa, Artificial Sequence
  Description of Artificial Sequence: Synthetic peptide
RQKRTATKAYNV

SEQ ID NO: 17754 - protein, 12 aa, Artificial Sequence
  Description of Artificial Sequence: Synthetic peptide
RSMWSFNPETNI

SEQ ID NO: 17755 - protein, 11 aa, Artificial Sequence
  Description of Artificial Sequence: Synthetic peptide
RSSSRSRNSSR

SEQ ID NO: 17756 - protein, 12 aa, Artificial Sequence
  Description of Artificial Sequence: Synthetic peptide
SAAEASKKPRQK

SEQ ID NO: 17757 - protein, 11 aa, Artificial Sequence
  Description of Artificial Sequence: Synthetic peptide
SAFFGMSRIGM

SEQ ID NO: 17758 - protein, 12 aa, Artificial Sequence
  Description of Artificial Sequence: Synthetic peptide
SAFFGMSRIGME

SEQ ID NO: 17759 - protein, 11 aa, Artificial Sequence
  Description of Artificial Sequence: Synthetic peptide
SELVIGAVILR

SEQ ID NO: 17760 - protein, 11 aa, Artificial Sequence
  Description of Artificial Sequence: Synthetic peptide
SEVGPEHSLAE

SEQ ID NO: 17761 - protein, 9 aa, Artificial Sequence
  Description of Artificial Sequence: Synthetic peptide
SMWSFNPET

SEQ ID NO: 17762 - protein, 11 aa, Artificial Sequence
  Description of Artificial Sequence: Synthetic peptide
SMWSFNPETNI

SEQ ID NO: 17763 - protein, 10 aa, Artificial Sequence
  Description of Artificial Sequence: Synthetic peptide
SSRGTSPARM

SEQ ID NO: 17764 - protein, 9 aa, Artificial Sequence
  Description of Artificial Sequence: Synthetic peptide
SSRNSTPGS

SEQ ID NO: 17765 - protein, 11 aa, Artificial Sequence
  Description of Artificial Sequence: Synthetic peptide
SSRNSTPGSSR

SEQ ID NO: 17766 - protein, 12 aa, Artificial Sequence
  Description of Artificial Sequence: Synthetic peptide
SYFIASFRLFAR

SEQ ID NO: 17767 - protein, 11 aa, Artificial Sequence
  Description of Artificial Sequence: Synthetic peptide
TATKAYNVTQA

SEQ ID NO: 17768 - protein, 12 aa, Artificial Sequence
  Description of Artificial Sequence: Synthetic peptide
TDHSSSSDNIAL

SEQ ID NO: 17769 - protein, 8 aa, Artificial Sequence
  Description of Artificial Sequence: Synthetic peptide
TDPSFLGR

SEQ ID NO: 17770 - protein, 10 aa, Artificial Sequence
  Description of Artificial Sequence: Synthetic peptide
TDPSFLGRYM

SEQ ID NO: 17771 - protein, 10 aa, Artificial Sequence
  Description of Artificial Sequence: Synthetic peptide
TDVFYKENSY

SEQ ID NO: 17772 - protein, 9 aa, Artificial Sequence
  Description of Artificial Sequence: Synthetic peptide
TEGALNTPK

SEQ ID NO: 17773 - protein, 9 aa, Artificial Sequence
  Description of Artificial Sequence: Synthetic peptide
TEPKKDKKK

SEQ ID NO: 17774 - protein, 8 aa, Artificial Sequence
  Description of Artificial Sequence: Synthetic peptide
TGAIKLDD

SEQ ID NO: 17775 - protein, 8 aa, Artificial Sequence
  Description of Artificial Sequence: Synthetic peptide
TGGIAIAM

SEQ ID NO: 17776 - protein, 11 aa, Artificial Sequence
  Description of Artificial Sequence: Synthetic peptide
TGPEAGLPYGA

SEQ ID NO: 17777 - protein, 8 aa, Artificial Sequence
  Description of Artificial Sequence: Synthetic peptide
TILTRPLL

SEQ ID NO: 17778 - protein, 9 aa, Artificial Sequence
  Description of Artificial Sequence: Synthetic peptide
TILTRPLLE

SEQ ID NO: 17779 - protein, 8 aa, Artificial Sequence
  Description of Artificial Sequence: Synthetic peptide
TIQPRVEK

SEQ ID NO: 17780 - protein, 12 aa, Artificial Sequence
  Description of Artificial Sequence: Synthetic peptide
TITVEELKKLLE

SEQ ID NO: 17781 - protein, 10 aa, Artificial Sequence
  Description of Artificial Sequence: Synthetic peptide
TKAYNVTQAF

SEQ ID NO: 17782 - protein, 12 aa, Artificial Sequence
  Description of Artificial Sequence: Synthetic peptide
TLACFVLAAVYR

SEQ ID NO: 17783 - protein, 11 aa, Artificial Sequence
  Description of Artificial Sequence: Synthetic peptide
TLLPAADLDDF

SEQ ID NO: 17784 - protein, 8 aa, Artificial Sequence
  Description of Artificial Sequence: Synthetic peptide
TLPKGFYA

SEQ ID NO: 17785 - protein, 9 aa, Artificial Sequence
  Description of Artificial Sequence: Synthetic peptide
TLSYYKLGA

SEQ ID NO: 17786 - protein, 9 aa, Artificial Sequence
  Description of Artificial Sequence: Synthetic peptide
TNILLNVPL

SEQ ID NO: 17787 - protein, 11 aa, Artificial Sequence
  Description of Artificial Sequence: Synthetic peptide
TPGSSRGTSPA

SEQ ID NO: 17788 - protein, 11 aa, Artificial Sequence
  Description of Artificial Sequence: Synthetic peptide
TPKDHIGTRNP

SEQ ID NO: 17789 - protein, 10 aa, Artificial Sequence
  Description of Artificial Sequence: Synthetic peptide
TQALPQRQKK

SEQ ID NO: 17790 - protein, 8 aa, Artificial Sequence
  Description of Artificial Sequence: Synthetic peptide
TRNPANNA

SEQ ID NO: 17791 - protein, 12 aa, Artificial Sequence
  Description of Artificial Sequence: Synthetic peptide
TRNPANNAAIVL

SEQ ID NO: 17792 - protein, 10 aa, Artificial Sequence
  Description of Artificial Sequence: Synthetic peptide
TSRTLSYYKL

SEQ ID NO: 17793 - protein, 11 aa, Artificial Sequence
  Description of Artificial Sequence: Synthetic peptide
TSRTLSYYKLG

SEQ ID NO: 17794 - protein, 12 aa, Artificial Sequence
  Description of Artificial Sequence: Synthetic peptide
TTDPSFLGRYMS

SEQ ID NO: 17795 - protein, 9 aa, Artificial Sequence
  Description of Artificial Sequence: Synthetic peptide
TTLPKGFYA

SEQ ID NO: 17796 - protein, 9 aa, Artificial Sequence
  Description of Artificial Sequence: Synthetic peptide
TVATSRTLS

SEQ ID NO: 17797 - protein, 11 aa, Artificial Sequence
  Description of Artificial Sequence: Synthetic peptide
VATEGALNTPK

SEQ ID NO: 17798 - protein, 11 aa, Artificial Sequence
  Description of Artificial Sequence: Synthetic peptide
VEELKKLLEQW

SEQ ID NO: 17799 - protein, 8 aa, Artificial Sequence
  Description of Artificial Sequence: Synthetic peptide
VGEIPVAY

SEQ ID NO: 17800 - protein, 10 aa, Artificial Sequence
  Description of Artificial Sequence: Synthetic peptide
VGEIPVAYRK

SEQ ID NO: 17801 - protein, 8 aa, Artificial Sequence
  Description of Artificial Sequence: Synthetic peptide
VGLMWLSY

SEQ ID NO: 17802 - protein, 11 aa, Artificial Sequence
  Description of Artificial Sequence: Synthetic peptide
VIGAVILRGHL

SEQ ID NO: 17803 - protein, 9 aa, Artificial Sequence
  Description of Artificial Sequence: Synthetic peptide
VILLNKHID

SEQ ID NO: 17804 - protein, 10 aa, Artificial Sequence
  Description of Artificial Sequence: Synthetic peptide
VLAAVYRINW

SEQ ID NO: 17805 - protein, 10 aa, Artificial Sequence
  Description of Artificial Sequence: Synthetic peptide
VPLHGTILTR

SEQ ID NO: 17806 - protein, 9 aa, Artificial Sequence
  Description of Artificial Sequence: Synthetic peptide
VTKKSAAEA

SEQ ID NO: 17807 - protein, 10 aa, Artificial Sequence
  Description of Artificial Sequence: Synthetic peptide
VTLLPAADLD

SEQ ID NO: 17808 - protein, 8 aa, Artificial Sequence
  Description of Artificial Sequence: Synthetic peptide
VTQAFGRR

SEQ ID NO: 17809 - protein, 8 aa, Artificial Sequence
  Description of Artificial Sequence: Synthetic peptide
WPVTLACF

SEQ ID NO: 17810 - protein, 11 aa, Artificial Sequence
  Description of Artificial Sequence: Synthetic peptide
WSFNPETNILL

SEQ ID NO: 17811 - protein, 11 aa, Artificial Sequence
  Description of Artificial Sequence: Synthetic peptide
YAEGSRGGSQA

SEQ ID NO: 17812 - protein, 11 aa, Artificial Sequence
  Description of Artificial Sequence: Synthetic peptide
YANRNRFLYII

SEQ ID NO: 17813 - protein, 11 aa, Artificial Sequence
  Description of Artificial Sequence: Synthetic peptide
YFYYLGTGPEA

SEQ ID NO: 17814 - protein, 9 aa, Artificial Sequence
  Description of Artificial Sequence: Synthetic peptide
YGANKDGII

SEQ ID NO: 17815 - protein, 10 aa, Artificial Sequence
  Description of Artificial Sequence: Synthetic peptide
YGANKDGIIW

SEQ ID NO: 17816 - protein, 11 aa, Artificial Sequence
  Description of Artificial Sequence: Synthetic peptide
YIIKLIFLWLL

SEQ ID NO: 17817 - protein, 9 aa, Artificial Sequence
  Description of Artificial Sequence: Synthetic peptide
YKLGASQRV

SEQ ID NO: 17818 - protein, 8 aa, Artificial Sequence
  Description of Artificial Sequence: Synthetic peptide
YLGTGPEA

SEQ ID NO: 17819 - protein, 9 aa, Artificial Sequence
  Description of Artificial Sequence: Synthetic peptide
YLGTGPEAG

SEQ ID NO: 17820 - protein, 12 aa, Artificial Sequence
  Description of Artificial Sequence: Synthetic peptide
YLGTGPEAGLPY

SEQ ID NO: 17821 - protein, 10 aa, Artificial Sequence
  Description of Artificial Sequence: Synthetic peptide
YRINWITGGI

SEQ ID NO: 17822 - protein, 12 aa, Artificial Sequence
  Description of Artificial Sequence: Synthetic peptide
YRINWITGGIAI

SEQ ID NO: 17823 - protein, 10 aa, Artificial Sequence
  Description of Artificial Sequence: Synthetic peptide
YSRYRIGNYK

SEQ ID NO: 17824 - protein, 10 aa, Artificial Sequence
  Description of Artificial Sequence: Synthetic peptide
YYKLGASQRV

SEQ ID NO: 17825 - protein, 8 aa, Artificial Sequence
  Description of Artificial Sequence: Synthetic peptide
FLFTWICL
